(19) United States
(12) Patent Application Publication
(10) Pub. No.: US 2025/0115907 A1
(43) Pub. Date: Apr. 10, 2025

(54) COMPOSITIONS AND METHODS FOR INHIBITING GENE EXPRESSION OF LPA

(71) Applicant: Arrowhead Pharmaceuticals, Inc., Pasadena, CA (US)

(72) Inventors: Stacey MELQUIST, Madison, WI (US); Steven KANNER, Madison, WI (US); David B. ROZEMA, Cross Plains, WI (US); David L. LEWIS, Madison, WI (US); Lauren J. ALMEIDA, Madison, WI (US); Darren H. WAKEFIELD, Fitchburg, WI (US); Vladimir S. TRUBETSKOY, Middleton, WI (US); Tao PEI, Middleton, WI (US); Zhen LI, Monona, WI (US); Aaron ALMEIDA, Madison, WI (US)

(73) Assignee: Arrowhead Pharmaceuticals, Inc., Pasadena, CA (US)

(21) Appl. No.: 18/745,289

(22) Filed: Jun. 17, 2024

Related U.S. Application Data
(63) Continuation of application No. 16/867,925, filed on May 6, 2020, now abandoned.
Application No. 16/867,925 is a continuation of application No. 15/901,810, filed on Feb. 21, 2018, now Pat. No. 10,662,427.
Application No. 15/901,810 is a continuation of application No. 15/281,309, filed on Sep. 30, 2016, now Pat. No. 9,932,586.
(60) Provisional application No. 62/383,221, filed on Sep. 2, 2016.
(60) Provisional application No. 62/346,304, filed on Jun. 6, 2016.
(60) Provisional application No. 62/235,816, filed on Oct. 1, 2015.

(51) Int. Cl. C12N 15/113

(52) U.S. Cl. CPC C12N 15/113; C12N 15/1137; C12Y 304/21; C12N 2310/14; C12N 2310/31; C12N 2310/315; C12N 2310/321; C12N 2310/351; C12N 2310/3517

(57) ABSTRACT

RNA interference (RNAi) agents and RNAi agent conjugates for inhibiting the expression of the LPA (apo(a)) gene are described. Pharmaceutical compositions comprising one or more LPA RNAi agents optionally with one or more additional therapeutics are also described. Delivery of the described LPA RNAi agents to liver cells in vivo provides for inhibition of LPA gene expression and treatment of cardiovascular and cardiovascular-related diseases.

### CROSS-REFERENCE TO RELATED APPLICATIONS

[0001] This application is a continuation of U.S. application Ser. No. 16/867,925, filed May 6, 2020, which is a continuation of U.S. application Ser. No. 15/901,810, filed Feb. 21, 2018, now U.S. Pat. No. 10,662,427, which is a continuation of U.S. application Ser. No. 15/281,309, filed Sep. 30, 2016, now U.S. Pat. No. 9,932,586, which claims the benefit of U.S. Provisional Application No. 62/383,221, filed Sep. 2, 2016; U.S. Provisional Application No. 62/346,304, filed Jun. 6, 2016; and U.S. Provisional Application No. 62/235,816, filed Oct. 1, 2015, all of which are hereby incorporated by reference in their entireties.

### DESCRIPTION OF THE TEXT FILE SUBMITTED ELECTRONICALLY

[0002] The present application contains a Sequence Listing, which has been submitted electronically in XML format and is hereby incorporated by reference in its entirety. The computer readable format copy of the Sequence Listing, which was created on Nov. 18, 2024, is named A-2132-US07-CNT_Seglisting and is 10,789,785 bytes in size.

### BACKGROUND

[0003] Lipoprotein(a) [Lp(a)] is a heterogeneous low density lipoprotein (LDL)-like particle containing a lipid core and apolipoprotein B (apoB-100) with a unique constituent, apolipoprotein (a) (apo(a)), that is attached to apoB-100 through a disulfide bond.

[0004] The apo(a) gene (LPA) is expressed predominantly in the liver and expression is restricted to human and non-human primates. Lp(a) levels in humans are genetically defined and do not change significantly with diet, exercise, or other lifestyle changes. LPA varies in length depending upon the number of Kringle KIV2 domains present and its expression is inversely correlated with the number of domains present. Normal Lp(a) levels range from 0.1-25 mg/dl, with about 25% of the population in the United States of America having Lp(a) levels of 30 mg/dl or higher.

[0005] Analysis of Lp(a) levels in multiple studies have implicated high Lp(a) levels as an independent risk factor for cardiovascular disease, stroke, and other related disorders including atherosclerotic stenosis. In addition, genome-wide association analyses have also implicated LPA as a genetic risk factor for diseases such as atherosclerotic stenosis.

[0006] When therapeutic lipoprotein apheresis is used to lower both Lp(a) and LDL levels in hyperlipidemic patients, significant reductions of cardiovascular events have been observed. Therefore there exists a need for therapeutics and treatments related to these and other LPA-related diseases.

### SUMMARY

[0007] Described herein are LPA (also termed apo(a)) RNA interference (RNAi) agents (also termed RNAi trigger, or trigger) and compositions containing LPA RNAi agents for selectively and efficiently inhibiting expression of the LPA gene. LPA is the name of the gene which encodes apolipoprotein (a) (apo(a)), a key component of the lipoprotein (a) particle (Lp(a)). The LPA RNAi agents described herein can be used in the prevention or treatment or the preparation of a medicament for the prevention or treatment of diseases including, but not limited to: Berger's disease, peripheral artery disease, coronary artery disease, metabolic syndrome, acute coronary syndrome, aortic valve stenosis, aortic valve regurgitation, aortic dissection, retinal artery occlusion, cerebrovascular disease, mesenteric ischemia, superior mesenteric artery occlusion, renal artery stenosis, stable/unstable angina, acute coronary syndrome, heterozygous or homozygous familial hypercholesterolemia, hyperapobetalipoproteinemia, cerebrovascular atherosclerosis, cerebrovascular disease, and venous thrombosis.

[0008] Each LPA RNAi agent includes at least a sense strand and an antisense strand. The sense strand and the antisense strand can be partially, substantially, or fully complementary to each other. The length of the RNAi agent sense and antisense strands described herein each can be 17 to 30 nucleotides in length. In some embodiments, the sense and antisense strands are independently 17 to 26 nucleotides in length. The sense and antisense strands can be either the same length or different lengths. The RNAi agents described herein, upon delivery to a cell expressing the LPA gene, inhibit the expression of the LPA gene in vitro or in vivo.

[0009] A sense strand of an LPA RNAi agent comprises a nucleotide sequence having at least 90% identity over a core stretch of at least 17 consecutive nucleotides to a sequence in an LPA mRNA. In some embodiments, the sense strand nucleotide sequence having at least 90% identity to a sequence in the LPA mRNA is 17, 18, 19, 20, 21, 22, or 23 nucleotides in length. An antisense strand of an LPA RNAi agent comprises a nucleotide sequence having at least 90% complementary over a core stretch of at least 16 consecutive nucleotides to a sequence in the LPA mRNA and the corresponding sense strand. In some embodiments, the antisense strand nucleotide sequence having at least 90% complementarity to a sequence in the LPA mRNA or the corresponding sense strand is 17, 18, 19, 20, 21, 22, or 23 nucleotides in length.

[0010] In some embodiments, one or more LPA RNAi agents are delivered to target cells or tissues using any oligonucleotide delivery technology known in the art. Nucleic acid delivery methods include, but are not limited to, by encapsulation in liposomes, by iontophoresis, or by incorporation into other vehicles, such as hydrogels, cyclodextrins, biodegradable nanocapsules, and bioadhesive microspheres, proteinaceous vectors or Dynamic Polyconjugates™ (DPCs (see, for example WO 2000/053722, WO 2008/0022309, WO 2011/104169, and WO 2012/083185, each of which is incorporated herein by reference). In some embodiments, an LPA RNAi agent is conjugated to a targeting group. In some embodiments, the targeting group can include a cell receptor ligand, such as a galactose cluster, including a galactose cluster comprising an N-acetyl-galactosamine trimer.

[0011] In some embodiments are described pharmaceutical compositions comprising one or more LPA RNAi agents. In some embodiments, an LPA RNAi agent is optionally combined with one or more additional (i.e., second, third, etc.) therapeutics. An additional therapeutic can be another LPA RNAi agent (e.g., an LPA RNAi agent which targets a different sequence within the LPA target). An additional therapeutic can also be a small molecule drug, antibody, antibody fragment, and/or vaccine. The LPA RNAi agents, with or without the one or more additional therapeutics, can be combined with one or more excipients to form pharmaceutical compositions.

[0012] In some embodiments, compositions for delivering an LPA RNAi agent to a liver cell, particularly hepatocytes, in vivo are described, comprising: an LPA RNAi agent conjugated to a targeting group. In some embodiments, the targeting group is a asialoglycoprotein ligand.

[0013] Also described are methods of treating a human subject having a pathological state or at risk of developing a pathological state mediated at least in part by LPA expression, the methods comprising the step(s) of administering to the subject a therapeutically effective amount of an LPA RNAi agent or LPA RNAi agent-containing composition. The method of treating a subject with an LPA RNAi agent or LPA RNAi agent-containing composition can optionally be combined with one or more steps of administering one or more additional (i.e., second) therapeutics or treatments. The LPA RNAi agent and additional therapeutics can be administered in a single composition or they may be administered separately. Examples of additional therapeutics include, but are not limited to, HMg Co-A reductase inhibitors (statins), ezetimibe, PCSK-9 inhibitors, CTEP inhibitors, therapies targeting ANGPTL3, therapies targeting APOC3, and niacin.

[0014] Use of the described LPA RNAi agents can be used in methods for therapeutic prevention or treatment of diseases including, but not limited to: Berger's disease, peripheral artery disease, coronary artery disease, metabolic syndrome, acute coronary syndrome, aortic valve stenosis, aortic valve regurgitation, aortic dissection, retinal artery occlusion, cerebrovascular disease, mesenteric ischemia, superior mesenteric artery occlusion, renal artery stenosis, stable/unstable angina, acute coronary syndrome, heterozygous or homozygous familial hypercholesterolemia, hyperapobetalipoproteinemia, cerebrovascular atherosclerosis, cerebrovascular disease, and venous thrombosis. Such methods comprise administration of an LPA RNAi agent as described herein to a subject, e.g., a human or animal subject.

[0015] The pharmaceutical compositions can be administered in a number of ways depending upon whether local or systemic treatment is desired and upon the area to be treated. Administration can be made by any way commonly known in the art, such as, but not limited to, topical (e.g., by a transdermal patch), pulmonary (e.g., by inhalation or insufflation of powders or aerosols, including by nebulizer, intratracheal, intranasal), epidermal, transdermal, oral or parenteral. Parenteral administration includes, but is not limited to, intravenous, intraarterial, subcutaneous, intraperitoneal or intramuscular injection or infusion; subdermal (e.g., via an implanted device), intracranial, intraparenchymal, intrathecal, and intraventricular, administration. In some embodiments, the pharmaceutical compositions described herein are administered by subcutaneous injection.

[0016] The described LPA RNAi agents and/or compositions can be used in methods for therapeutic treatment of diseases, including but not limited to: Berger's disease, peripheral artery disease, coronary artery disease, metabolic syndrome, acute coronary syndrome, aortic valve stenosis, aortic valve regurgitation, aortic dissection, retinal artery occlusion, cerebrovascular disease, mesenteric ischemia, superior mesenteric artery occlusion, renal artery stenosis, stable/unstable angina, acute coronary syndrome, heterozygous or homozygous familial hypercholesterolemia, hyperapobetalipoproteinemia, cerebrovascular atherosclerosis, cerebrovascular disease, and venous thrombosis. Such methods comprise administration of an LPA RNAi agent as described herein to a subject, e.g., a human or animal subject.

[0017] Unless otherwise defined, all technical and scientific terms used herein have the same meaning as commonly understood by one of ordinary skill in the art to which this invention belongs. Although methods and materials similar or equivalent to those described herein can be used in the practice or testing of the present invention, suitable methods and materials are described below. All publications, patent applications, patents, and other references mentioned herein are incorporated by reference in their entirety. In case of conflict, the present specification, including definitions, will control. In addition, the materials, methods, and examples are illustrative only and not intended to be limiting.

[0018] Other features and advantages of the invention will be apparent from the following detailed description, and from the claims.

### BRIEF DESCRIPTION OF THE FIGURES

[0019] FIG. 1. Graph illustrating serum Lp(a) protein levels in Lp(a) transgenic (Tg) mice following a single subcutaneous administration of 0.5 mg/kg (dashed line) or 2 mg/kg (solid line) of indicated LPA RNAi agent. Lp(a) levels were normalized to day 1 and saline control.

[0020] FIG. 2. Graph illustrating serum Lp(a) protein levels in Lp(a) Tg mice following administration of three subcutaneous doses of 1 mg/kg (dashed line) or 3 mg/kg (solid line) of indicated LPA RNAi agent, administered once a week for three weeks (dose on days 1, 8, and 15). Lp(a) levels were normalized to day 1 and saline control.

[0021] FIG. 3. Graph illustrating Lp(a) particle levels in Cynomolgus monkey serum following administration of a single 2 mg/kg AD01196 LPA RNAi agent dosed 1:1 (wt/wt) with delivery polymer on day 1. Lp(a) levels were normalized to two pre-dose values (shown as day 0).

[0022] FIG. 4. Graph illustrating Lp(a) particle levels in Cynomolgus monkey serum following administration of 4 mg/kg or 6 mg/kg LPA RNAi agent dosed 1:1 (wt/wt) with delivery polymer on day 1 and day 71. Lp(a) levels were normalized to two pre-dose values (shown as day 0). 4 mg/kg dose=black circles; 6 mg/kg dose=gray squares.

[0023] FIG. 5. Graph illustrating Lp(a) particle levels in Cynomolgus monkey serum following three weekly subcutaneous doses of 3 mg/kg of AD02819 LPA RNAi agent on days 1, 8, and 15. Lp(a) levels were normalized to three pre-dose values (shown as day 0).

[0024] FIG. 6. Graph illustrating Lp(a) particle levels in Cynomolgus monkey serum following a single subcutaneous administration of 3 mg/kg of LPA RNAi agent on day 1. AD03460 and AD03536 groups received an additional 1 mg/kg dose of LPA RNAi agent on day 48. Lp(a) levels were normalized to three pre-dose values (shown as day 0).

### DETAILED DESCRIPTION

[0025] Described herein are RNAi agents for inhibiting expression of the LPA gene (referred to herein as LPA RNAi agents). The RNAi agents described herein, upon delivery to a cell expressing the LPA gene, inhibit or knockdown expression of LPA in vitro and/or in vivo through the biological process of RNA interference (RNAi). As used herein, unless specifically noted otherwise, LPA may refer to an LPA gene, an LPA mRNA, or an LP(a) protein, as appropriate.

[0026] An LPA RNAi agent comprises a sense strand and an antisense strand. The sense strand and antisense strand each contain a core sequence 17-23 nucleobases in length. An antisense strand core sequence is 100% (perfectly) complementary or at least 90% (substantially) complementary to a nucleotide sequence (sometimes referred to, e.g., as a target sequence) present in an LPA mRNA. A sense strand core sequence is 100% (perfectly) complementary or at least 90% (substantially) complementary to a sequence in the antisense strand and thus the sense strand core sequence is perfectly identical or at least 90% identical to a nucleotide sequence (target sequence) present in the LPA mRNA. A sense strand core sequence can be the same length as a corresponding antisense core sequence or it can be a different length. In some embodiments, the antisense strand core sequence is 17, 18, 19, 20, 21, 22, or 23 nucleotides in length. In some embodiments, the sense strand core sequence is 17, 18, 19, 20, 21, 22, or 23 nucleotides in length.

[0027] LPA RNAi agent sense and antisense strands anneal to form a duplex. A sense strand and an antisense strand of an LPA RNAi agent are partially, substantially, or fully complementary to each other. Within the complementary duplex region, the sense strand core sequence is at least 90% complementary or 100% complementary to the antisense core sequence. In some embodiments, the sense strand core sequence contains a sequence of at least 17, at least 18, at least 19, at least 20, or at least 21 nucleotides that is at least 90% or 100% complementary to a corresponding 17, 18, 19, 20, or 21 nucleotide sequence of the antisense strand core sequence (i.e., the sense strand and antisense core sequences of an LPA RNAi agent have a region of at least 17, at least 18, at least 19, at least 20, or at least 21 nucleotides that is at least 90% base paired or 100% base paired.)

[0028] As used herein, and unless otherwise indicated, the term “complementary,” when used to describe a first nucleotide sequence (e.g., RNAi agent sense strand or LPA mRNA) in relation to a second nucleotide sequence (e.g., RNAi agent antisense strand), refers to the ability of an oligonucleotide or polynucleotide comprising the first nucleotide sequence to hybridize (form base pair hydrogen bonds) and form a duplex or double helical structure under certain conditions with an oligonucleotide or polynucleotide comprising the second nucleotide sequence. Complementary sequences include Watson-Crick base pairs or non-Watson-Crick base pairs and include natural or modified nucleotides or nucleotide mimics as long as the above requirements with respect to their ability to hybridize are fulfilled. “Perfectly complementary” or “fully complementary” means that all (100%) of the bases in a contiguous sequence of a first polynucleotide will hybridize with the same number of bases in a contiguous sequence of a second polynucleotide. The contiguous sequence may comprise all or a part of a first or second nucleotide sequence. As used herein, “partial complementary” means that in a hybridized pair of nucleobase sequences, at least 70% of the bases in a contiguous sequence of a first polynucleotide will hybridize with the same number of bases in a contiguous sequence of a second polynucleotide. As used herein, “substantial complementary” means that in a hybridized pair of nucleobase sequences, at least 85% of the bases in a contiguous sequence of a first polynucleotide will hybridize with the same number of bases in a contiguous sequence of a second polynucleotide. The terms “complementary”, “fully complementary” and “substantially complementary” as used herein may be used with respect to the base matching between the sense strand and the antisense strand of an RNAi agent, or between the antisense strand of an RNAi agent and a sequence of an LPA mRNA. Sequence identity or complementarity is independent of modification. For the purposes of determining identity or complementarity, for example, a and Af are complementary to U (or T) and identical to A.

[0029] The length of the LPA RNAi agent sense and antisense strands described herein are independently 17 to 30 nucleotides in length. In some embodiments, the sense and antisense strands are independently 17 to 26 nucleotides in length. In some embodiments, the sense and antisense strands are 19-26 nucleotides in length. In some embodiments, the described RNAi agent sense and antisense strands are independently 17, 18, 19, 20, 21, 22, 23, 24, 25, or 26 nucleotides in length. The sense and antisense strands can be either the same length or they can be different lengths. In some embodiments, a sense strand and an antisense strand are each 26 nucleotides in length. In some embodiments, a sense strand is 23 nucleotides in length and an antisense strand is 21 nucleotides in length. In some embodiments, a sense strand is 22 nucleotides in length and an antisense strand is 21 nucleotides in length. In some embodiments, a sense strand is 21 nucleotides in length and an antisense strand is 21 nucleotides in length. In some embodiments, a sense strand is 19 nucleotides in length and an antisense strand is 21 nucleotides in length.

[0030] The sense strand and/or the antisense strand may optionally and independently contain an additional 1, 2, 3, 4, 5, or 6 nucleotides (extension) at the 3′ end, the 5′ end, or both the 3′ and 5′ ends of the core sequences. The antisense strand additional nucleotides, if present, may or may not be complementary to the corresponding sequence in the LPA mRNA. The sense strand additional nucleotides, if present, may or may not be identical to the corresponding sequence in the LPA mRNA. The antisense strand additional nucleotides, if present, may or may not be complementary to the corresponding sense strand's additional nucleotides, if present.

[0031] As used herein, an extension comprises 1, 2, 3, 4, 5, or 6 nucleotides at the 5′ and/or 3′ end of the sense strand core sequence and/or antisense strand core sequence. The extension nucleotides on a sense strand may or may not be complementary to nucleotides, either core sequence nucleotides or extension nucleotides, in the corresponding antisense strand. Conversely, the extension nucleotides on an antisense strand may or may not be complementary to nucleotides, either core sequence nucleotides or extension nucleotides, in the corresponding sense strand. In some embodiments, both the sense strand and the antisense strand of an RNAi agent contain 3′ and 5′ extensions. In some embodiments, one or more of the 3′ extension nucleotides of one strand base pairs with one or more 5′ extension nucleotides of the other strand. In other embodiments, one or more of 3′ extension nucleotides of one strand do not base pair with one or more 5′ extension nucleotides of the other strand. In some embodiments, an LPA RNAi agent has an antisense strand having a 3′ extension and a sense strand having a 5′ extension.

[0032] In some embodiments an LPA RNAi agent comprises an antisense strand having a 3′ extension of 1, 2, 3, 4, 5, or 6 nucleotides in length. In other embodiments, an LPA RNAi agent comprises an antisense strand having a 3′ extension of 1, 2, or 3 nucleotides in length. In some embodiments, one or more of the antisense strand extension nucleotides comprise uracil or thymidine nucleotides or nucleotides which are complementary to the corresponding LPA mRNA sequence. In some embodiments, a 3′ antisense strand extension includes or consists of, but is not limited to: Ab, AbAb, AUA, UGCUU, CUG, UG, UGCC, CUGCC, CGU, CUU, UGCCUA, CUGCCU, UGCCU, UGAUU, GCCUAU, T, TT (each listed 5′ to 3′).

[0033] In some embodiments, an LPA RNAi agent comprises an antisense strand having a 5′ extension of 1, 2, 3, 4, or 5 nucleotides in length. In other embodiments, an LPA RNAi agent comprises an antisense strand having a 5′ extension of 1 or 2 nucleotides in length. In some embodiments, one or more of the antisense strand extension nucleotides comprises uracil or thymidine nucleotides or nucleotides which are complementary to the corresponding LPA mRNA sequence. In some embodiments, the 5′ antisense strand extension includes or consists of, but is no limited to, UA, TU, U, T, CUC (each listed 5′ to 3′). An antisense strand may have any of the 3′ extensions described above in combination with any of the 5′ antisense strand extensions described, if present.

[0034] In some embodiments, an LPA RNAi agent comprises a sense strand having a 3′ extension of 1, 2, 3, 4, or 5 nucleotides in length. In some embodiments, one or more of the sense strand extension nucleotides comprises adenosine, uracil, or thymidine nucleotides, AT dinucleotide, or nucleotides which correspond to nucleotides in the LPA mRNA sequence. In some embodiments, the 3′ sense strand extension includes or consists of, but is no limited to: T, UUAb, UAb, Ab, UT, TT, UUT, TTT, or TTTT (each listed 5′ to 3′).

[0035] In some embodiments, an LPA RNAi agent comprises a sense strand having a 5′ extension of 1, 2, 3, 4, 5, or 6 nucleotides in length. In some embodiments, one or more of the sense strand extension nucleotides comprise uracil or adenosine nucleotides or nucleotides which correspond to nucleotides in the LPA mRNA sequence. In some embodiments, the sense strand 5′ extension can be, but is not limited to: CA, AUAGGC, AUAGG, AUAG, AUA, A, AA, AC, GCA, GGCA, GGC, UAUCA, UAUC, Ab, UCA, UAU (each listed 5′ to 3′). A sense strand may have a 3′ extension and/or a 5′ extension.

[0036] Examples of nucleotide sequences used in forming LPA RNAi agents are provided in Tables 1, 2A, 2B, 3A, and 3B. As used herein, the term “sequence” or “nucleotide sequence” refers to a succession or order of nucleobases, nucleotides, and/or nucleosides, whether modified or unmodified, described with a succession of letters using the standard nucleotide nomenclature and the key for modified nucleotides described herein.

[0037] RNAi agents include, but are not limited to: short interfering RNAs (siRNAs), double-strand RNAs (dsRNA), micro RNAs (miRNAs), short hairpin RNAs (shRNA), and dicer substrates (e.g., U.S. Pat. Nos. 8,084,599, 8,349,809, and 8,513,207).

[0038] Unmodified LPA RNAi agent sense strand and antisense strand sequences are provided in Table 1. In forming LPA RNAi agents, each of the nucleotides in each of the sequences listed in Table 1 may be a modified nucleotide.

TABLE 1
Unmodified LPA RNAi agent antisense strand
and sense strand sequences.

| Antisense strand base | SEQ | Sense strand base | SEQ |
|---|---|---|---|
| sequence 5′→3′ | ID NO. | sequence 5′→3′ | ID NO. |
| TCGGCAGUCCCUUCUGCGUTT | 1 | ACGCAGAAGGGACUGCCGAT | 190 |
| TGUAGCACUCCUGCACCCCTT | 2 | GGGGUGCAGGAGUGCUACAT | 191 |
| TAAUAAGGGGCUGCCACAGTT | 3 | CUGUGGCAGCCCCUUAUUAT | 192 |
| TUAACAAUAAGGGGCUGCCTT | 4 | GGCAGCCCCUUAUUGUUAAT | 193 |
| TGUAUAACAAUAAGGGGCUTT | 5 | AGCCCCUUAUUGUUAUACAT | 194 |
| TCGUAUAACAAUAAGGGGCTT | 6 | GCCCCUUAUUGUUAUACGAT | 195 |
| TCGUCUGAGCAUUGUGUCATT | 7 | UGACACAAUGCUCAGACGAT | 196 |
| TGCGUCUGAGCAUUGUGUCTT | 8 | GACACAAUGCUCAGACGCAT | 197 |
| TUGCGUCUGAGCAUUGUGUTT | 9 | ACACAAUGCUCAGACGCAAT | 198 |
| TUCUGCGUCUGAGCAUUGUTT | 10 | ACAAUGCUCAGACGCAGAAT | 199 |
| TGGAUCUGGAUUUCGGCAGTT | 11 | CUGCCGAAAUCCAGAUCCAT | 200 |
| TCAGGAUCUGGAUUUCGGCTT | 12 | GCCGAAAUCCAGAUCCUGAT | 201 |
| TCAUCUGAGCAUCGUGUCATT | 13 | UGACACGAUGCUCAGAUGAT | 202 |
| TGCAUCUGAGCAUCGUGUCTT | 14 | GACACGAUGCUCAGAUGCAT | 203 |
| TUGCAUCUGAGCAUCGUGUTT | 15 | ACACGAUGCUCAGAUGCAAT | 204 |
| TUCUGCAUCUGAGCAUCGUTT | 16 | ACGAUGCUCAGAUGCAGAAT | 205 |
| TAAAGCCUCUAGGCUUGGATT | 17 | UCCAAGCCUAGAGGCUUUAT | 206 |
| TGUACCCCGGGGGUUUCCUTT | 18 | AGGAAACCCCCGGGGUACAT | 207 |
| TUGUACCCCGGGGGUUUCCTT | 19 | GGAAACCCCCGGGGUACAAT | 208 |
| TCUGUACCCCGGGGGUUUCTT | 20 | GAAACCCCCGGGGUACAGAT | 209 |
| TUCCAUAAUGGUAGUAGCATT | 21 | UGCUACUACCAUUAUGGAAT | 210 |
| TGUCCAUAAUGGUAGUAGCTT | 22 | GCUACUACCAUUAUGGACAT | 211 |
| TCUCUGUCCAUAAUGGUAGTT | 23 | CUACCAUUAUGGACAGAGAT | 212 |
| TCGACUAUGCUGGUGUGGUTT | 24 | ACCACACCAGCAUAGUCGAT | 213 |
| TCCGACUAUGCUGGUGUGGTT | 25 | CCACACCAGCAUAGUCGGAT | 214 |
| TUCCGACUAUGCUGGUGUGTT | 26 | CACACCAGCAUAGUCGGAAT | 215 |
| TGGUCCGACUAUGCUGGUGTT | 27 | CACCAGCAUAGUCGGACCAT | 216 |
| TUUUCUGGGGUCCGACUAUTT | 28 | AUAGUCGGACCCCAGAAAAT | 217 |
| TUUUUCUGGGGUCCGACUATT | 29 | UAGUCGGACCCCAGAAAAAT | 218 |
| TGCGAAUCUCAGCAUCUGGTT | 30 | CCAGAUGCUGAGAUUCGCAT | 219 |
| TCCAAGGGCGAAUCUCAGCTT | 31 | GCUGAGAUUCGCCCUUGGAT | 220 |
| TACCAAGGGCGAAUCUCAGTT | 32 | CUGAGAUUCGCCCUUGGUAT | 221 |
| TCACCAAGGGCGAAUCUCATT | 33 | UGAGAUUCGCCCUUGGUGAT | 222 |
| TACACCAAGGGCGAAUCUCTT | 34 | GAGAUUCGCCCUUGGUGUAT | 223 |
| TCCUGACACUGGGAUCCAUTT | 35 | AUGGAUCCCAGUGUCAGGAT | 224 |
| TUGCAAGGACACUUGAUUCTT | 36 | GAAUCAAGUGUCCUUGCAAT | 225 |
| TUUGCAAGGACACUUGAUUTT | 37 | AAUCAAGUGUCCUUGCAAAT | 226 |
| TUUGCUCCGUUGGUGCUUCTT | 38 | GAAGCACCAACGGAGCAAAT | 227 |
| TAAUGAGCCUCGAUAACUCTT | 39 | GAGUUAUCGAGGCUCAUUAT | 228 |
| TGAAUGAGCCUCGAUAACUTT | 40 | AGUUAUCGAGGCUCAUUCAT | 229 |
| TGGAUAAUAUUCUGUUGUCTT | 41 | GACAACAGAAUAUUAUCCAT | 230 |
| TCCAUGGUAUAACACCAAGTT | 42 | CUUGGUGUUAUACCAUGGAT | 231 |
| TGAUCCAUGGUAUAACACCTT | 43 | GGUGUUAUACCAUGGAUCAT | 232 |
| TAUUGGGAUCCAUGGUAUATT | 44 | UAUACCAUGGAUCCCAAUAT | 233 |
| TCAUUGGGAUCCAUGGUAUTT | 45 | AUACCAUGGAUCCCAAUGAT | 234 |
| TACAUUGGGAUCCAUGGUATT | 46 | UACCAUGGAUCCCAAUGUAT | 235 |
| TGACAUUGGGAUCCAUGGUTT | 47 | ACCAUGGAUCCCAAUGUCAT | 236 |
| TGACAUUGUGUCAGGUUGCTT | 48 | GCAACCUGACACAAUGUCAT | 237 |
| TCACUGGACAUUGUGUCAGTT | 49 | CUGACACAAUGUCCAGUGAT | 238 |
| TACUUGAUUCUGUCACUGGTT | 50 | CCAGUGACAGAAUCAAGUAT | 239 |
| TGAGAAUGAGCCUCGAUAATT | 51 | UUAUCGAGGCUCAUUCUCAT | 240 |
| TCCAUUUGGGUAGUAUUCUTT | 52 | AGAAUACUACCCAAAUGGAT | 241 |
| TCACCAUUUGGGUAGUAUUTT | 53 | AAUACUACCCAAAUGGUGAT | 242 |
| TCCACCAUUUGGGUAGUAUTT | 54 | AUACUACCCAAAUGGUGGAT | 243 |
| TAUAACACCAAGGGCGAAUTT | 55 | AUUCGCCCUUGGUGUUAUAT | 244 |
| TACUGGGAUCCAUGGUAUATT | 56 | UAUACCAUGGAUCCCAGUAT | 245 |
| TCACUGGGAUCCAUGGUAUTT | 57 | AUACCAUGGAUCCCAGUGAT | 246 |
| TACCACCGUGGGAGUUGUGTT | 58 | CACAACUCCCACGGUGGUAT | 247 |
| TCAAGACUGACAUGUUCUUTT | 59 | AAGAACAUGUCAGUCUUGAT | 248 |
| TGGGAGUUGUGAGGACACUTT | 60 | AGUGUCCUCACAACUCCCAT | 249 |
| TUCUCAGGUGGUGCUUGUUTT | 61 | AACAAGCACCACCUGAGAAT | 250 |
| TCACAGGGCUUUUCUCAGGTT | 62 | CCUGAGAAAAGCCCUGUGAT | 251 |
| TGAUGCCAGUGUGGUAUCATT | 63 | UGAUACCACACUGGCAUCAT | 252 |
| TUGAUGCCAGUGUGGUAUCTT | 64 | GAUACCACACUGGCAUCAAT | 253 |
| TGACACCUGAUUCUGUUUCTT | 65 | GAAACAGAAUCAGGUGUCAT | 254 |
| TGGACACCUGAUUCUGUUUTT | 66 | AAACAGAAUCAGGUGUCCAT | 255 |
| TCUAGGACACCUGAUUCUGTT | 67 | CAGAAUCAGGUGUCCUAGAT | 256 |
| TAUAAGGGGCUGCCACAGGTT | 68 | CCUGUGGCAGCCCCUUAUAT | 257 |
| TAACAAUAAGGGGCUGCCATT | 69 | UGGCAGCCCCUUAUUGUUAT | 258 |
| TGUCCGACUAUGCUGGUGUTT | 70 | ACACCAGCAUAGUCGGACAT | 259 |
| TUCUCAGCAUCUGGAUUCCTT | 71 | GGAAUCCAGAUGCUGAGAAT | 260 |
| TCGAAUCUCAGCAUCUGGATT | 72 | UCCAGAUGCUGAGAUUCGAT | 261 |
| TAAGGGCGAAUCUCAGCAUTT | 73 | AUGCUGAGAUUCGCCCUUAT | 262 |
| TUGACACUGGGAUCCAUGGTT | 74 | CCAUGGAUCCCAGUGUCAAT | 263 |
| TCCGUUGGUGCUUCUUCAGTT | 75 | CUGAAGAAGCACCAACGGAT | 264 |
| TCUUGAUUCUGUCACUGGATT | 76 | UCCAGUGACAGAAUCAAGAT | 265 |
| TCACCGUGGGAGUUGUGAGTT | 77 | CUCACAACUCCCACGGUGAT | 266 |
| TUCUAGGACACCUGAUUCUTT | 78 | AGAAUCAGGUGUCCUAGAAT | 267 |
| TAGUCUCUAGGACACCUGATT | 79 | UCAGGUGUCCUAGAGACUAT | 268 |
| TCAAUAAGGGGCUGCCACATT | 80 | UAUAGCCCCUUAUUGUUAUACAT | 269 |
| TCUGCGUCUGAGCAUUGUGTT | 81 | UAUGCCCCUUAUUGUUAUACGAT | 270 |
| TACAGGAUCUGGAUUUCGGTT | 82 | UAUGACACAAUGCUCAGACGCAT | 271 |
| TCCGGGGGUUUCCUCAGUCTT | 83 | UAUACACAAUGCUCAGACGCAAT | 272 |
| TUGUCCAUAAUGGUAGUAGTT | 84 | UAUUUAUCGAGGCUCAUUCUCAT | 273 |
| TUCUGUCCAUAAUGGUAGUTT | 85 | UAUGAAACAGAAUCAGGUGUCAT | 274 |
| TACUCUGUCCAUAAUGGUATT | 86 | UAUACACCAGCAUAGUCGGACAT | 275 |
| TAACUCUGUCCAUAAUGGUTT | 87 | UAUUCCAGAUGCUGAGAUUCGAT | 276 |
| TGGGCGAAUCUCAGCAUCUTT | 88 | UAUAUGCUGAGAUUCGCCCUUAT | 277 |
| TAGGGCGAAUCUCAGCAUCTT | 89 | UAUCCAUGGAUCCCAGUGUCAAT | 278 |
| TAACACCAAGGGCGAAUCUTT | 90 | UGUGGCAGCCCCUUAUUGAT | 279 |
| TAGGACACUUGAUUCUGUCTT | 91 | CACAAUGCUCAGACGCAGAT | 280 |
| TGGACCAAGACUGACAUGUTT | 92 | CCGAAAUCCAGAUCCUGUAT | 281 |
| TGGUCAGGCCACCAUUUGGTT | 93 | GACUGAGGAAACCCCCGGAT | 282 |
| TAUCCAUGGUAUAACACCATT | 94 | CUACUACCAUUAUGGACAAT | 283 |
| TGGGAUCCAUGGUAUAACATT | 95 | ACUACCAUUAUGGACAGAAT | 284 |
| TUGGACAUUGUGUCAGGUUTT | 96 | UACCAUUAUGGACAGAGUAT | 285 |
| TAUUCUGUCACUGGACAUUTT | 97 | ACCAUUAUGGACAGAGUUAT | 286 |
| TGGUGCUUGUUCAGAAACATT | 98 | AGAUGCUGAGAUUCGCCCAT | 287 |
| TGGAGAAUGAGCCUCGAUATT | 99 | GAUGCUGAGAUUCGCCCUAT | 288 |
| TGUGGAGAAUGAGCCUCGATT | 100 | AGAUUCGCCCUUGGUGUUAT | 289 |
| TCCGUGGGAGUUGUGAGGATT | 101 | GACAGAAUCAAGUGUCCUAT | 290 |
| TGGACCACCGUGGGAGUUGTT | 102 | ACAUGUCAGUCUUGGUCCAT | 291 |
| TUGCUUGUUCAGAAGGAGCTT | 103 | CCAAAUGGUGGCCUGACCAT | 292 |
| TCUGAUGCCAGUGUGGUAUTT | 104 | UGGUGUUAUACCAUGGAUAT | 293 |
| TUAGGACACCUGAUUCUGUTT | 105 | UGUUAUACCAUGGAUCCCAT | 294 |
| TCUCUAGGACACCUGAUUCTT | 106 | AACCUGACACAAUGUCCAAT | 295 |
| TUCUCUAGGACACCUGAUUTT | 107 | AAUGUCCAGUGACAGAAUAT | 296 |
| TGUCUCUAGGACACCUGAUTT | 108 | UGUUUCUGAACAAGCACCAT | 297 |
| TGAGAAUGAGCCUCGAUAACUCUUAU | 109 | UAUCGAGGCUCAUUCUCCAT | 298 |
| TGACACCUGAUUCUGUUUCUGAGUAU | 110 | UCGAGGCUCAUUCUCCACAT | 299 |
| TCGUAUAACAAUAAGGGGCUGCCUAU | 111 | UCCUCACAACUCCCACGGAT | 300 |
| TGCGUCUGAGCAUUGUGUCAGGUUAU | 112 | CAACUCCCACGGUGGUCCAT | 301 |
| TUGCGUCUGAGCAUUGUGUCAGGUAU | 113 | GCUCCUUCUGAACAAGCAAT | 302 |
| TAAGGGCGAAUCUCAGCAUCUGGUAU | 114 | AUACCACACUGGCAUCAGAT | 303 |
| UUAACAAUAAGGGGCUGCAb | 115 | ACAGAAUCAGGUGUCCUAAT | 304 |
| UGUAUAACAAUAAGGGGCAb | 116 | GAAUCAGGUGUCCUAGAGAT | 305 |
| UCGUAUAACAAUAAGGGGAb | 117 | AAUCAGGUGUCCUAGAGAAT | 306 |
| UGCGUCUGAGCAUUGUGUAb | 118 | AUCAGGUGUCCUAGAGACAT | 307 |
| UUGCGUCUGAGCAUUGUGAb | 119 | UAUAUAGUUAUCGAGGCUCAUUCUCA | 308 |
| UCAGGAUCUGGAUUUCGGAb | 120 | UAUAUCAGAAACAGAAUCAGGUGUCA | 309 |
| UUGCAUCUGAGCAUCGUGAb | 121 | UAUAUCAGCCCCUUAUUGUUAUACGA | 310 |
| UCGACUAUGCUGGUGUGGAb | 122 | UAUAUCUGACACAAUGCUCAGACGCA | 311 |
| UUUUCUGGGGUCCGACUAAb | 123 | UAUAUUGACACAAUGCUCAGACGCAA | 312 |
| UGCGAAUCUCAGCAUCUGAb | 124 | UAUAUAGAUGCUGAGAUUCGCCCUUA | 313 |
| UUGCAAGGACACUUGAUUAb | 125 | GCAGCCCCUUAUUGUUAA | 314 |
| UAAUGAGCCUCGAUAACUAb | 126 | GCCCCUUAUUGUUAUACA | 315 |
| UGAAUGAGCCUCGAUAACAb | 127 | CCCCUUAUUGUUAUACGA | 316 |
| UGACAUUGUGUCAGGUUGAb | 128 | ACACAAUGCUCAGACGCA | 317 |
| UGAGAAUGAGCCUCGAUAAb | 129 | CACAAUGCUCAGACGCAA | 318 |
| UCCAUUUGGGUAGUAUUCAb | 130 | CCGAAAUCCAGAUCCUGA | 319 |
| UCACCAUUUGGGUAGUAUAb | 131 | CACGAUGCUCAGAUGCAA | 320 |
| UGACACCUGAUUCUGUUUAb | 132 | CCACACCAGCAUAGUCGA | 321 |
| UGGACACCUGAUUCUGUUAb | 133 | UAGUCGGACCCCAGAAAA | 322 |
| UUAACAAUAAGGGGCUGAbAb | 134 | CAGAUGCUGAGAUUCGCA | 323 |
| UGUAUAACAAUAAGGGGAbAb | 135 | AAUCAAGUGUCCUUGCAA | 324 |
| UCGUAUAACAAUAAGGGAbAb | 136 | AGUUAUCGAGGCUCAUUA | 325 |
| UGCGUCUGAGCAUUGUGAbAb | 137 | GUUAUCGAGGCUCAUUCA | 326 |
| UUGCGUCUGAGCAUUGUAbAb | 138 | CAACCUGACACAAUGUCA | 327 |
| UCAGGAUCUGGAUUUCGAbAb | 139 | UAUCGAGGCUCAUUCUCA | 328 |
| UUGCAUCUGAGCAUCGUAbAb | 140 | GAAUACUACCCAAAUGGA | 329 |
| UCGACUAUGCUGGUGUGAbAb | 141 | AUACUACCCAAAUGGUGA | 330 |
| UUUUCUGGGGUCCGACUAbAb | 142 | AAACAGAAUCAGGUGUCA | 331 |
| UGCGAAUCUCAGCAUCUAbAb | 143 | AACAGAAUCAGGUGUCCA | 332 |
| UUGCAAGGACACUUGAUAbAb | 144 | CAGCCCCUUAUUGUUAA | 333 |
| UAAUGAGCCUCGAUAACAbAb | 145 | CCCCUUAUUGUUAUACA | 334 |
| UGAAUGAGCCUCGAUAAAbAb | 146 | CCCUUAUUGUUAUACGA | 335 |
| UGACAUUGUGUCAGGUUAbAb | 147 | CACAAUGCUCAGACGCA | 336 |
| UGAGAAUGAGCCUCGAUAbAb | 148 | ACAAUGCUCAGACGCAA | 337 |
| UCCAUUUGGGUAGUAUUAbAb | 149 | CGAAAUCCAGAUCCUGA | 338 |
| UCACCAUUUGGGUAGUAAbAb | 150 | ACGAUGCUCAGAUGCAA | 339 |
| UGACACCUGAUUCUGUUAbAb | 151 | CACACCAGCAUAGUCGA | 340 |
| UGGACACCUGAUUCUGUAbAb | 152 | AGUCGGACCCCAGAAAA | 341 |
| UGAGAAUGAGCCUCGAUAACUCUUAU | 153 | AGAUGCUGAGAUUCGCA | 342 |
| UGACACCUGAUUCUGUUUCUGAGUAU | 154 | AUCAAGUGUCCUUGCAA | 343 |
| UGAGAAUGAGCCUCGAUAACUCTUAU | 155 | GUUAUCGAGGCUCAUUA | 344 |
| UCGUAUAACAAUAAGGGGCUGCCUAU | 156 | UUAUCGAGGCUCAUUCA | 345 |
| UGAGAAUGAGCCUCGAUAATT | 157 | AACCUGACACAAUGUCA | 346 |
| UCGUAUAACAAUAAGGCGCUGCCUAU | 158 | AUCGAGGCUCAUUCUCA | 347 |
| UGAGAAUGAGCCUCGATAbAb | 159 | AAUACUACCCAAAUGGA | 348 |
| UGACACCUGAUUCUGTTAbAb | 160 | UACUACCCAAAUGGUGA | 349 |
| UCGUAUAACAAUAAGGGGCUGAUU | 161 | AACAGAAUCAGGUGUCA | 350 |
| UCGUAUAACAAUAAGGGGCUGCUU | 162 | ACAGAAUCAGGUGUCCA | 351 |
| UGAGAAUGAGCCUCGAUAACUCUU | 163 | UAUAUCAGCGCCUUAUUGUUAUACGA | 352 |
| UCGUAUAACAAUAAGGGGCUU | 164 | ATCGAGGCUCAUUCUCA | 353 |
| UGUAUAACAAUAAGGGG | 165 | UCAGCCCCUUAUUGUUAUACGAUUAb | 354 |
| UCGUAUAACAAUAAGGG | 166 | UcAGccccuuAuuGuuAuAcGAAb | 355 |
| UGAGAAUGAGCCUCGAT | 167 | UAGUUAUCGAGGCUCAUUCUCAUUAb | 356 |
| UGACACCUGAUUCUGTT | 168 | AbGCCCCUUAUUGUUAUACGAUUAb | 357 |
| TUCGUAUAACAAUAAGGGGCUGCCUA | 169 | AUAUCAGCCCCUUAUUGUUAUACGAT | 358 |
| UAUCGUAUAACAAUAAGGGGCUGCCU | 170 | UAUCAGCCCCUUAUUGUUAUACGAUT | 359 |
| TCCGUAUAACAAUAAGGGGCUGCCUA | 171 | AUAUAGUUAUCGAGGCUCAUUCUCAT | 360 |
| CUCCGUAUAACAAUAAGGGGCUGCCU | 172 | UAUAGUUAUCGAGGCUCAUUCUCAUT | 361 |
| TUGAGAAUGAGCCUCGAUAACUCUUA | 173 | AbUUAUCGAGGCUCAUUCUCAUUAb | 362 |
| UAUGAGAAUGAGCCUCGAUAACUCUU | 174 | UAUAUAAUUAUCGAGGCUCAUUCUCAAb | 363 |
| TGGAGAAUGAGCCUCGAUAACUCUUA | 175 | GGCAGCCCCUUAUUGUUAUACGATT | 364 |
| GUGGAGAAUGAGCCUCGAUAACUCUU | 176 | GGCAGCCCCUUAUUGUUAUACGAUUT | 365 |
| UGAGAAUGAGCCUCGAUAAUU | 177 | CAGCCCCUUAUUGUUAUACGATTTT | 366 |
| TCGUAUAACAAUAAGGGGCUU | 178 | GCGAUAGUUAUCGAGGCUCAUUCUCA | 367 |
| UGAGAAUGAGCCUCGAUAAUUAUAUA | 179 | UGAAUAGUUAUCGAGGCUCAUUCUCA | 368 |
| UCGUAUAACAAUAAGGGGCUGCC | 180 | AUCGUAGUUAUCGAGGCUCAUUCUCA | 369 |
| TUCGUAUAACAAUAAGGGGCUGCC | 181 | UAUAAAGUUAUCGAGGCUCAUUCUCA | 370 |
| TUCGUAUAACAAUAAGGGGCUG | 182 | AGCCCCUUAUUGUUAUACGAAb | 371 |
| UGAGAAUGAGCCUCGAUAACUAUCGC | 183 | AAGCCCCUUAUUGUUAUACGAAb | 372 |
| UGAGAAUGAGCCUCGAUAACUAUUCA | 184 | GCAGCCCCUUAUUGUUAUACGAAb | 373 |
| UGAGAAUGAGCCUCGAUAACUACGAU | 185 | UAUAUAGUUAUCGAGGCUCAUUCUCAAb | 374 |
| UCGUAUAACAAUAAGGGGCGU | 186 | ACGCCCCUUAUUGUUAUACGAAb | 375 |
| UCGUAUAACAAUAAGGGGCUGCCU | 187 | GccccuuAuuGuuAuAcGAuuAb | 376 |
| UCGUAUAACAAUAAGGGGCUG | 188 | AGCCCCUUAUUGUUAUACGAUUAb | 377 |
| TCGUAUAACAAUAAGGGGCUGCUU | 189 | AAGccccuuAuuGuuAuAcGAuuAb | 378 |
| TCGUAUAACAAUAAGGGGC | 1242 | UAUCAGCCCCUUAUUGUUAUACGA | 379 |
| UCGUAUAACAAUAAGGGG | 1244 | UAGCAGCCCCUUAUUGUUAUACGA | 380 |
| UCGUAUAACAAUAAGGG | 1246 | GCAGCCCCUUAUUGUUAUACGA | 381 |
| TGAGAAUGAGCCUCGAUAA | 1248 | AUAAGAGUUAUCGAGGCUCAUUCUCA | 382 |
| UGAGAAUGAGCCUCGAUA | 1250 | AUAGGCAGCCCCUUAUUGUUAUACGA | 383 |
| UGAGAAUGAGCCUCGAU | 1252 | CAGCCCCUUAUUGUUAUACGA | 384 |
| UGUAUAACAAUAAGGGG | 1254 | UAUAUCAGCCCCTUAUUGUUAUACGA | 385 |
| CGUAUAACAAUAAGGGGC | 1280 | AbGCCCCTUAUUGUUAUACGAUUAb | 1241 |
| GAGAAUGAGCCUCGAUAA | 1281 | GCCCCUUAUUGUUAUACGA | 1243 |
| UCGUAUAACAAUAAGGGGC | 1282 | CCCCUUAUUGUUAUACGA | 1245 |
| UGAGAAUGAGCCUCGAUAA | 1283 | CCCUUAUUGUUAUACGA | 1247 |
| | | UUAUCGAGGCUCAUUCUCA | 1249 |
| | | UAUCGAGGCUCAUUCUCA | 1251 |
| | | AUCGAGGCUCAUUCUCA | 1253 |
| | | CCCCUUAUUGUUAUACA | 1255 |
| | | UUAUCGAGGCUCAUUCUCA | 1258 |
| | | GCCCCUUAUUGUUAUACGA | 1259 |
| | | ACAGCCCCUUAUUGUUAUACGA | 1260 |
| | | AAAGCCCCUUAUUGUUAUACGA | 1261 |
| | | GCCCCUUAUUGUUAUACG | 1284 |
| | | UUAUCGAGGCUCAUUCUC | 1285 |

Ab = abasic nucleotide

[0039] The LPA RNAi agents described herein are formed by annealing an antisense strand with a sense strand. A sense strand containing a sequence listed in Table 1 or Table 2B can be hybridized to any antisense strand containing a sequence listed in Table 1 or Table 2A provided the two sequences have a region of at least 90% complementarity over a contiguous 16, 17, 18, 19, 20, or 21 nucleotide sequence.

[0040] In some embodiments, an LPA RNAi agent antisense strand comprises a nucleotide sequence of any of the sequences in Table 1. In some embodiments, an LPA RNAi agent antisense strand comprises the sequence of nucleotides 1-17, 2-17, 1-18, 2-18, 1-19, 2-19, 1-20, 2-20, 1-21, 2-21, 1-22, 2-22, 1-23, 2-23, 1-24, 2-24, 1-25, 2-25, 1-26, or 2-26 of any of the sequences in Table 1. In some embodiments, an LPA RNAi agent sense strand comprises the nucleotide sequence of any of the sequences in Tables 1. In some embodiments, an LPA RNAi agent sense strand comprises the sequence of nucleotides 1-17, 2-17, 1-18, 2-18, 1-19, 2-19, 1-20, 2-20, 1-21, 2-21, 1-22, 2-22, 1-23, 2-23, 1-24, 2-24, 1-25, 2-25, 1-26, or 2-26 of any of the sequences in Table 1.

[0041] In some embodiments, the sense and antisense strands of the RNAi agents described herein contain the same number of nucleotides. In some embodiments the sense and antisense strands of the RNAi agents described herein contain different numbers of nucleotides. In some embodiments, the sense strand 5′ end and the antisense strand 3′ end of an RNAi agent form a blunt end. In some embodiments, the sense strand 3′ end and the antisense strand 5′ end of an RNAi agent form a blunt end. In some embodiments, both ends of an RNAi agent form blunt ends. In some embodiments, neither end of an RNAi agent is blunt-ended. As used herein a blunt end refers to an end of a double stranded RNAi agent in which the terminal nucleotides of the two annealed strands are complementary (form a complementary base-pair). In some embodiments, the sense strand 5′ end and the antisense strand 3′ end of an RNAi agent form a frayed end. In some embodiments, the sense strand 3′ end and the antisense strand 5′ end of an RNAi agent form a frayed end. In some embodiments, both ends of an RNAi agent form a frayed end. In some embodiments, neither end of an RNAi agent is a frayed end. As used herein a frayed end refers to an end of a double stranded RNAi agent in which the terminal nucleotides of the two annealed strands from a pair (i.e. do not form an overhang) but are not complementary (i.e. form a non-complementary pair). As used herein, an overhang is a stretch of one or more unpaired nucleotides at the end of one strand of a double stranded RNAi agent. The unpaired nucleotides may be on the sense strand or the antisense strand, creating either 3′ or 5′ overhangs. In some embodiments the RNAi agent contains: a blunt end and a frayed end, a blunt end and 5′ overhang end, a blunt end and a 3′ overhang end, a frayed end and a 5′ overhang end, a frayed end and a 3′ overhang end, two 5′ overhang ends, two 3′ overhang ends, a 5′ overhang end and a 3′ overhang end, two frayed ends, or two blunt ends.

[0042] A nucleotide base (or nucleobase) is a heterocyclic pyrimidine or purine compound which is a constituent of all nucleic acids and includes adenine (A), guanine (G), cytosine (C), thymine (T), and uracil (U). As used herein, the term “nucleotide” can include a modified nucleotide or nucleotide mimic, abasic site (Ab or X), or a surrogate replacement moiety.

[0043] In some embodiments, an LPA RNAi agent is prepared or provided as a salt, mixed salt, or a free-acid.

### Modified Nucleotides

[0044] In some embodiments, an LPA RNAi agent contains one or more modified nucleotides. As used herein, a “modified nucleotide” is a nucleotide other than a ribonucleotide (2′-hydroxyl nucleotide). In some embodiments, at least 50%, at least 60%, at least 70%, at least 80%, at least 90%, at least 95%, or 100% of the nucleotides are modified. Modified nucleotides include, but are not limited to, deoxynucleotides, nucleotide mimics, abasic nucleotides (represented herein as X, Ab), 2′-modified nucleotides, 3′ to 3′ linkages (inverted) nucleotides (represented herein as invdN, invN, invn, invX, invAb, non-natural base-comprising nucleotides, bridged nucleotides, peptide nucleic acids (PNAs), 2′,3′-seco nucleotide mimics (unlocked nucleobase analogues, represented herein as N_{UNA or} NUNA), locked nucleotides (represented herein as N_{LNA} or N_{LNA}), 3′-O-Methoxy (2′ internucleoside linked) nucleotides (represented herein as 3′-OMen), 2′-F-Arabino nucleotides (represented herein as NfANA or Nf_{ANA}), 5′-Me,2′-fluoro nucleotide (represented herein as 5Me-Nf), morpholino nucleotides, vinyl phosphonate deoxyribonucleotides (represented herein as vpdN), vinyl phosphonate containing nucleotides, and cyclopropyl phosphonate containing nucleotides (cPrpN). 2′-modified nucleotides (i.e. a nucleotide with a group other than a hydroxyl group at the 2′ position of the five-membered sugar ring) include, but are not limited to, 2′-O-methyl nucleotides (represented herein as a lower case letter ‘n’ in a nucleotide sequence), 2′-deoxy-2′-fluoro nucleotides (represented herein as Nf, also represented herein as 2′-fluoro nucleotide), 2′-deoxy nucleotides (represented herein as dN), 2′-methoxyethyl (2′-O-2-methoxylethyl) nucleotides (represented herein as NM or 2′-MOE), 2′-amino nucleotides, and 2′-alkyl nucleotides. It is not necessary for all positions in a given compound to be uniformly modified. Conversely, more than one modification may be incorporated in a single LPA RNAi agent or even in a single nucleotide thereof. The LPA RNAi agent sense strands and antisense strands may be synthesized and/or modified by methods known in the art. Modification at one nucleotide is independent of modification at another nucleotide.

[0045] Modified nucleotides also include nucleotides having modified nucleobases. Modified nucleobases include, but are not limited to, synthetic and natural nucleobases, 5-substituted pyrimidines, 6-azapyrimidines and N-2, N-6 and 0-6 substituted purines, including 2-aminopropyladenine, 5-propynyluracil and 5-propynylcytosine, 5-methylcytosine (5-me-C), 5-hydroxymethyl cytosine, xanthine, hypoxanthine, 2-aminoadenine, 6-methyl and other alkyl derivatives of adenine and guanine, 2-propyl and other alkyl derivatives of adenine and guanine, 2-thiouracil, 2-thiothymine and 2-thiocytosine, 5-halouracil and cytosine, 5-propynyl uracil and cytosine, 6-azo uracil, cytosine and thymine, 5-uracil (pseudouracil), 4-thiouracil, 8-halo, 8-amino, 8-thiol, 8-thioalkyl, 8-hydroxyl and other 8-substituted adenines and guanines, 5-halo particularly 5-bromo, 5-trifluoromethyl and other 5-substituted uracils and cytosines, 7-methylguanine and 7-methyladenine, 8-azaguanine and 8-azaadenine, 7-deazaguanine and 7-deazaadenine and 3-deazaguanine and 3-deazaadenine.

### Modified Internucleoside Linkages

[0046] In some embodiments, one or more nucleotides of an LPA RNAi agent are linked by non-standard linkages or backbones (i.e. modified internucleoside linkages or modified backbones). In some embodiments, a modified internucleoside linkage is a non-phosphate-containing covalent internucleoside linkage. Modified internucleoside linkages or backbones include, but are not limited to, 5′-phosphorothioate group (represented herein as a lower case ‘s’ before a nucleotide, as in sN, sn, sNf, or sdN), chiral phosphorothioates, thiophosphate, phosphorodithioates, phosphotriesters, aminoalkyl-phosphotriesters, methyl and other alkyl phosphonates including 3′-alkylene phosphonates and chiral phosphonates, phosphinates, phosphoramidates including 3′-amino phosphoramidate and aminoalkylphosphoramidates, thionophosphoramidates, thionoalkyl-phosphonates, thionoalkylphosphotriesters, morpholino linkages, and boranophosphates having normal 3′-5′ linkages, 2′-5′ linked analogs of these, and those having inverted polarity wherein the adjacent pairs of nucleoside units are linked 3′-5′ to 5′-3′ or 2′-5′ to 5′-2′. In other embodiments, a modified internucleoside linkage or backbone lacks a phosphorus atom. Modified internucleoside linkages lacking a phosphorus atom include, but are not limited to, short chain alkyl or cycloalkyl inter-sugar linkages, mixed heteroatom and alkyl or cycloalkyl inter-sugar linkages, or one or more short chain heteroatomic or heterocyclic inter-sugar linkages. In some embodiments, modified internucleoside backbones include, but are not limited to, siloxane backbones, sulfide, sulfoxide and sulfone backbones; formacetyl and thioformacetyl backbones, methylene formacetyl and thioformacetyl backbones, alkene containing backbones, sulfamate backbones, methyleneimino and methylenehydrazino backbones, sulfonate and sulfonamide backbones, amide backbones; and others having mixed N, O, S, and CH₂ component parts.

[0047] In some embodiments, a sense strand of an LPA RNAi agent can contain 1, 2, 3, 4 phosphorothioate linkages, an antisense strand of an LPA RNAi agent can contain 1, 2, 3, or 4 phosphorothioate linkages, or both the sense strand and the antisense strand independently can contain 1, 2, 3, or 4 phosphorothioate linkages.

[0048] In some embodiments, an LPA RNAi agent sense strand contains two phosphorothioate internucleoside linkages. In some embodiments, the two phosphorothioate internucleoside linkages are between the nucleotides at positions 1-3 from the 3′ end of the sense strand. In some embodiments, the two phosphorothioate internucleoside linkages are between the nucleotides at positions 1-3, 2-4, 3-5, 4-6, 4-5, or 6-8 from the 5′ end of the sense strand. In some embodiments, an LPA RNAi agent antisense strand contains four phosphorothioate internucleoside linkages. In some embodiments, the four phosphorothioate internucleoside linkages are between the nucleotides at positions 1-3 from the 5′ end of the sense strand and between the nucleotides at positions 19-21, 20-22, 21-23, 22-24, 23-25, or 24-26 from the 5′ end. In some embodiments, an LPA RNAi agent contains two phosphorothioate internucleoside linkages in the sense strand and four phosphorothioate internucleoside linkages in the antisense strand.

[0049] In some embodiments, an LPA RNAi agent contains one or more modified nucleotides and one or more modified internucleoside linkages. In some embodiments, a 2′-modified nucleotide is combined with modified internucleoside linkage.

### LPA RNAi Agents Having Modified Nucleotides

[0050] Examples of antisense strands containing modified nucleotides are provided in Table 2A. Examples of sense strands containing modified nucleotides are provided in Table 2B. In Tables 2A and 2B, the following notations are used to indicate modified nucleotides:
[0051] N=2′-OH (unmodified) ribonucleotide (capital letter without f or d indication)
[0052] n=2′-OMe modified nucleotide
[0053] Nf=2′-fluoro modified nucleotide
[0054] dN=2′-deoxy nucleotides
[0055] N_{UNA}=2′,3′-seco nucleotide mimics (unlocked nucleobase analogs)
[0056] N_{LNA}=locked nucleotide
[0057] Nf_{ANA}=2′-F-Arabino nucleotide
[0058] NM=2′-methoxyethyl nucleotide
[0059] Ab=abasic ribose
[0060] (invdN)=inverted deoxyribonucleotide (3′-3′ linked nucleotide)
[0061] (invAb)=inverted abasic nucleotide
[0062] (invn)=inverted 2′-OMe nucleotide
[0063] s=phosphorothioate linked nucleotide
[0064] p=phosphate
[0065] vpdN=vinyl phosphonate deoxyribonucleotide
[0066] (3′OMen)=3′-OMe nucleotide
[0067] (5Me-Nf)=5′-Me, 2′-fluoro nucleotide
[0068] cPrp=cyclopropyl phosphonate
[0069] epTcPr=see Table 4
[0070] epTM=see Table 4

[0071] In addition the following targeting groups and linking groups are listed in Tables 2A and 2B: (Alk-PEG5-C6), (C11-PEG3-NAG3), (C12), (C6-PEG4-NAG3), (C6-SS-Alk-Me), (Chol-TEG), (Dy54), (NAG13), (NAG18), (NAG24), (NAG25), (NAG26), (NAG27), (NAG28), (NAG29), (NAG30), (NAG31), (NAG32), (NAG33), (NAG34), (NAG35), (NAG36), (NAG37), (NAG4), (PAZ), (Sp18), (Steryl), (Alk-SMPT-C6). Each sense strand and/or antisense strand can have any of the above indicated targeting groups or linking groups, as well as other targeting or linking groups, conjugated to the 5′ and/or 3′ end of the sequence. The chemical structures for these groups are provided in Table 4.

TABLE 2A
LPA RNAi agent antisense strands having modified nucleotides.

| Antisense | | SEQ | SEQ |
|---|---|---|---|
| Strand ID | Antisense strand sequence 5′ → 3′ | ID NO. | ID NO. |
| AM01240-AS | dTCfgGfcAfgUfcCfcUfuCfuGfcGfudTsdT | 386 | 1 |
| AM01241-AS | dTGfuAfgCfaCfuCfcUfgCfaCfcCfcdTsdT | 387 | 2 |
| AM01242-AS | dTAfaUfaAfgGfgGfcUfgCfcAfcAfgdTsdT | 388 | 3 |
| AM01243-AS | dTUfaAfcAfaUfaAfgGfgGfcUfgCfcdTsdT | 389 | 4 |
| AM01244-AS | dTGfuAfuAfaCfaAfuAfaGfgGfgCfudTsdT | 390 | 5 |
| AM01245-AS | dTCfgUfaUfaAfcAfaUfaAfgGfgGfcdTsdT | 391 | 6 |
| AM01246-AS | dTCfgUfcUfgAfgCfaUfuGfuGfuCfadTsdT | 392 | 7 |
| AM01247-AS | dTGfcGfuCfuGfaGfcAfuUfgUfgUfcdTsdT | 393 | 8 |
| AM01248-AS | dTUfgCfgUfcUfgAfgCfaUfuGfuGfudTsdT | 394 | 9 |
| AM01249-AS | dTUfcUfgCfgUfcUfgAfgCfaUfuGfudTsdT | 395 | 10 |
| AM01250-AS | dTGfgAfuCfuGfgAfuUfuCfgGfcAfgdTsdT | 396 | 11 |
| AM01251-AS | dTCfaGfgAfuCfuGfgAfuUfuCfgGfcdTsdT | 397 | 12 |
| AM01252-AS | dTCfaUfcUfgAfgCfaUfcGfuGfuCfadTsdT | 398 | 13 |
| AM01253-AS | dTGfcAfuCfuGfaGfcAfuCfgUfgUfcdTsdT | 399 | 14 |
| AM01254-AS | dTUfgCfaUfcUfgAfgCfaUfcGfuGfudTsdT | 400 | 15 |
| AM01255-AS | dTUfcUfgCfaUfcUfgAfgCfaUfcGfudTsdT | 401 | 16 |
| AM01256-AS | dTAfaAfgCfcUfcUfaGfgCfuUfgGfadTsdT | 402 | 17 |
| AM01257-AS | dTGfuAfcCfcCfgGfgGfgUfuUfcCfudTsdT | 403 | 18 |
| AM01258-AS | dTUfgUfaCfcCfcGfgGfgGfuUfuCfcdTsdT | 404 | 19 |
| AM01259-AS | dTCfuGfuAfcCfcCfgGfgGfgUfuUfcdTsdT | 405 | 20 |
| AM01260-AS | dTUfcCfaUfaAfuGfgUfaGfuAfgCfadTsdT | 406 | 21 |
| AM01261-AS | dTGfuCfcAfuAfaUfgGfuAfgUfaGfcdTsdT | 407 | 22 |
| AM01262-AS | dTCfuCfuGfuCfcAfuAfaUfgGfuAfgdTsdT | 408 | 23 |
| AM01263-AS | dTCfgAfcUfaUfgCfuGfgUfgUfgGfudTsdT | 409 | 24 |
| AM01264-AS | dTCfcGfaCfuAfuGfcUfgGfuGfuGfgdTsdT | 410 | 25 |
| AM01265-AS | dTUfcCfgAfcUfaUfgCfuGfgUfgUfgdTsdT | 411 | 26 |
| AM01266-AS | dTGfgUfcCfgAfcUfaUfgCfuGfgUfgdTsdT | 412 | 27 |
| AM01267-AS | dTUfuUfcUfgGfgGfuCfcGfaCfuAfudTsdT | 413 | 28 |
| AM01268-AS | dTUfuUfuCfuGfgGfgUfcCfgAfcUfadTsdT | 414 | 29 |
| AM01269-AS | dTGfcGfaAfuCfuCfaGfcAfuCfuGfgdTsdT | 415 | 30 |
| AM01270-AS | dTCfcAfaGfgGfcGfaAfuCfuCfaGfcdTsdT | 416 | 31 |
| AM01271-AS | dTAfcCfaAfgGfgCfgAfaUfcUfcAfgdTsdT | 417 | 32 |
| AM01272-AS | dTCfaCfcAfaGfgGfcGfaAfuCfuCfadTsdT | 418 | 33 |
| AM01273-AS | dTAfcAfcCfaAfgGfgCfgAfaUfcUfcdTsdT | 419 | 34 |
| AM01274-AS | dTCfcUfgAfcAfcUfgGfgAfuCfcAfudTsdT | 420 | 35 |
| AM01275-AS | dTUfgCfaAfgGfaCfaCfuUfgAfuUfcdTsdT | 421 | 36 |
| AM01276-AS | dTUfuGfcAfaGfgAfcAfcUfuGfaUfudTsdT | 422 | 37 |
| AM01277-AS | dTUfuGfcUfcCfgUfuGfgUfgCfuUfcdTsdT | 423 | 38 |
| AM01278-AS | dTAfaUfgAfgCfcUfcGfaUfaAfcUfcdTsdT | 424 | 39 |
| AM01279-AS | dTGfaAfuGfaGfcCfuCfgAfuAfaCfudTsdT | 425 | 40 |
| AM01280-AS | dTGfgAfuAfaUfaUfuCfuGfuUfgUfcdTsdT | 426 | 41 |
| AM01281-AS | dTCfcAfuGfgUfaUfaAfcAfcCfaAfgdTsdT | 427 | 42 |
| AM01282-AS | dTGfaUfcCfaUfgGfuAfuAfaCfaCfcdTsdT | 428 | 43 |
| AM01283-AS | dTAfuUfgGfgAfuCfcAfuGfgUfaUfadTsdT | 429 | 44 |
| AM01284-AS | dTCfaUfuGfgGfaUfcCfaUfgGfuAfudTsdT | 430 | 45 |
| AM01285-AS | dTAfcAfuUfgGfgAfuCfcAfuGfgUfadTsdT | 431 | 46 |
| AM01286-AS | dTGfaCfaUfuGfgGfaUfcCfaUfgGfudTsdT | 432 | 47 |
| AM01287-AS | dTGfaCfaUfuGfuGfuCfaGfgUfuGfcdTsdT | 433 | 48 |
| AM01288-AS | dTCfaCfuGfgAfcAfuUfgUfgUfcAfgdTsdT | 434 | 49 |
| AM01289-AS | dTAfcUfuGfaUfuCfuGfuCfaCfuGfgdTsdT | 435 | 50 |
| AM01290-AS | dTGfaGfaAfuGfaGfcCfuCfgAfuAfadTsdT | 436 | 51 |
| AM01291-AS | dTCfcAfuUfuGfgGfuAfgUfaUfuCfudTsdT | 437 | 52 |
| AM01292-AS | dTCfaCfcAfuUfuGfgGfuAfgUfaUfudTsdT | 438 | 53 |
| AM01293-AS | dTCfcAfcCfaUfuUfgGfgUfaGfuAfudTsdT | 439 | 54 |
| AM01294-AS | dTAfuAfaCfaCfcAfaGfgGfcGfaAfudTsdT | 440 | 55 |
| AM01295-AS | dTAfcUfgGfgAfuCfcAfuGfgUfaUfadTsdT | 441 | 56 |
| AM01296-AS | dTCfaCfuGfgGfaUfcCfaUfgGfuAfudTsdT | 442 | 57 |
| AM01297-AS | dTAfcCfaCfcGfuGfgGfaGfuUfgUfgdTsdT | 443 | 58 |
| AM01298-AS | dTCfaAfgAfcUfgAfcAfuGfuUfcUfudTsdT | 444 | 59 |
| AM01299-AS | dTGfgGfaGfuUfgUfgAfgGfaCfaCfudTsdT | 445 | 60 |
| AM01300-AS | dTUfcUfcAfgGfuGfgUfgCfuUfgUfudTsdT | 446 | 61 |
| AM01301-AS | dTCfaCfaGfgGfcUfuUfuCfuCfaGfgdTsdT | 447 | 62 |
| AM01302-AS | dTGfaUfgCfcAfgUfgUfgGfuAfuCfadTsdT | 448 | 63 |
| AM01303-AS | dTUfgAfuGfcCfaGfuGfuGfgUfaUfcdTsdT | 449 | 64 |
| AM01304-AS | dTGfaCfaCfcUfgAfuUfcUfgUfuUfcdTsdT | 450 | 65 |
| AM01305-AS | dTGfgAfcAfcCfuGfaUfuCfuGfuUfudTsdT | 451 | 66 |
| AM01306-AS | dTCfuAfgGfaCfaCfcUfgAfuUfcUfgdTsdT | 452 | 67 |
| AM01796-AS | dTAfuAfaGfgGfgCfuGfcCfaCfaGfgdTsdT | 453 | 68 |
| AM01798-AS | dTAfaCfaAfuAfaGfgGfgCfuGfcCfadTsdT | 454 | 69 |
| AM01800-AS | dTGfuCfcGfaCfuAfuGfcUfgGfuGfudTsdT | 455 | 70 |
| AM01802-AS | dTUfcUfcAfgCfaUfcUfgGfaUfuCfcdTsdT | 456 | 71 |
| AM01804-AS | dTCfgAfaUfcUfcAfgCfaUfcUfgGfadTsdT | 457 | 72 |
| AM01806-AS | dTAfaGfgGfcGfaAfuCfuCfaGfcAfudTsdT | 458 | 73 |
| AM01808-AS | dTUfgAfcAfcUfgGfgAfuCfcAfuGfgdTsdT | 459 | 74 |
| AM01810-AS | dTCfcGfuUfgGfuGfcUfuCfuUfcAfgdTsdT | 460 | 75 |
| AM01812-AS | dTCfuUfgAfuUfcUfgUfcAfcUfgGfadTsdT | 461 | 76 |
| AM01814-AS | dTCfaCfcGfuGfgGfaGfuUfgUfgAfgdTsdT | 462 | 77 |
| AM01816-AS | dTUfcUfaGfgAfcAfcCfuGfaUfuCfudTsdT | 463 | 78 |
| AM01818-AS | dTAfgUfcUfcUfaGfgAfcAfcCfuGfadTsdT | 464 | 79 |
| AM02003-AS | dTGfuAfuAfaCfaAfuaaGfgGfgCfudTsdT | 465 | 5 |
| AM02004-AS | dTGfuAfuA_{UNA}aCfaAfuaaGfgGfgCfudTsdT | 466 | 5 |
| AM02005-AS | dTGfuAfuAfA_{UNA}CfaAfuaaGfgGfgCfudTsdT | 467 | 5 |
| AM02007-AS | dTCfgUfaUfaAfcAfauaAfgGfgGfcdTsdT | 468 | 6 |
| AM02008-AS | dTCfgUfaU_{UNA}aAfcAfauaAfgGfgGfcdTsdT | 469 | 6 |
| AM02009-AS | dTCfgUfaUfA_{UNA}AfcAfauaAfgGfgGfcdTsdT | 470 | 6 |
| AM02011-AS | dTGfcGfuCfuGfaGfcauUfgUfgUfcdTsdT | 471 | 8 |
| AM02012-AS | dTGfcGfuC_{UNA}uGfaGfcauUfgUfgUfcdTsdT | 472 | 8 |
| AM02013-AS | dTGfcGfuCfU_{UNA}GfaGfcauUfgUfgUfcdTsdT | 473 | 8 |
| AM02015-AS | dTUfgCfgUfcUfgAfgcaUfuGfuGfudTsdT | 474 | 9 |
| AM02016-AS | dTUfgCfgU_{UNA}cUfgAfgcaUfuGfuGfudTsdT | 475 | 9 |
| AM02017-AS | dTUfgCfgUfC_{UNA}UfgAfgcaUfuGfuGfudTsdT | 476 | 9 |
| AM02019-AS | dTGfaGfaAfuGfaGfccuCfgAfuAfadTsdT | 477 | 51 |
| AM02020-AS | dTGfaGfaA_{UNA}uGfaGfccuCfgAfuAfadTsdT | 478 | 51 |
| AM02021-AS | dTGfaGfaAfU_{UNA}GfaGfccuCfgAfuAfadTsdT | 479 | 51 |
| AM02023-AS | dTGfaCfaCfcUfgAfuucUfgUfuUfcdTsdT | 480 | 65 |
| AM02024-AS | dTGfaCfaC_{UNA}cUfgAfuucUfgUfuUfcdTsdT | 481 | 65 |
| AM02025-AS | dTGfaCfaCfC_{UNA}UfgAfuucUfgUfuUfcdTsdT | 482 | 65 |
| AM02027-AS | dTGfuCfcGfaCfuAfugcUfgGfuGfudTsdT | 483 | 70 |
| AM02028-AS | dTGfuCfcG_{UNA}aCfuAfugcUfgGfuGfudTsdT | 484 | 70 |
| AM02029-AS | dTGfuCfcGfA_{UNA}CfuAfugcUfgGfuGfudTsdT | 485 | 70 |
| AM02031-AS | dTCfgAfaUfcUfcAfgcaUfcUfgGfadTsdT | 486 | 72 |
| AM02032-AS | dTCfgAfaU_{UNA}cUfcAfgcaUfcUfgGfadTsdT | 487 | 72 |
| AM02033-AS | dTCfgAfaUfC_{UNA}UfcAfgcaUfcUfgGfadTsdT | 488 | 72 |
| AM02035-AS | dTAfaGfgGfcGfaAfucuCfaGfcAfudTsdT | 489 | 73 |
| AM02036-AS | dTAfaGfgG_{UNA}cGfaAfucuCfaGfcAfudTsdT | 490 | 73 |
| AM02037-AS | dTAfaGfgGfC_{UNA}GfaAfucuCfaGfcAfudTsdT | 491 | 73 |
| AM02039-AS | dTUfgAfcAfcUfgGfgauCfcAfuGfgdTsdT | 492 | 74 |
| AM02040-AS | dTUfgAfcA_{UNA}cUfgGfgauCfcAfuGfgdTsdT | 493 | 74 |
| AM02041-AS | dTUfgAfcAfC_{UNA}UfgGfgauCfcAfuGfgdTsdT | 494 | 74 |
| AM02240-AS | dTCfaAfuAfaGfgGfgcuGfcCfaCfadTsdT | 495 | 80 |
| AM02241-AS | dTCfuGfcGfuCfuGfagcAfuUfgUfgdTsdT | 496 | 81 |
| AM02242-AS | dTAfcAfgGfaUfcUfggaUfuUfcGfgdTsdT | 497 | 82 |
| AM02243-AS | dTCfcGfgGfgGfuUfuccUfcAfgUfcdTsdT | 498 | 83 |
| AM02244-AS | dTUfgUfcCfaUfaAfuggUfaGfuAfgdTsdT | 499 | 84 |
| AM02245-AS | dTUfcUfgUfcCfaUfaauGfgUfaGfudTsdT | 500 | 85 |
| AM02246-AS | dTAfcUfcUfgUfcCfauaAfuGfgUfadTsdT | 501 | 86 |
| AM02247-AS | dTAfaCfuCfuGfuCfcauAfaUfgGfudTsdT | 502 | 87 |
| AM02248-AS | dTGfgGfcGfaAfuCfucaGfcAfuCfudTsdT | 503 | 88 |
| AM02249-AS | dTAfgGfgCfgAfaUfcucAfgCfaUfcdTsdT | 504 | 89 |
| AM02250-AS | dTAfaCfaCfcAfaGfggcGfaAfuCfudTsdT | 505 | 90 |
| AM02251-AS | dTAfgGfaCfaCfuUfgauUfcUfgUfcdTsdT | 506 | 91 |
| AM02252-AS | dTGfgAfcCfaAfgAfcugAfcAfuGfudTsdT | 507 | 92 |
| AM02253-AS | dTGfgUfcAfgGfcCfaccAfuUfuGfgdTsdT | 508 | 93 |
| AM02254-AS | dTAfuCfcAfuGfgUfauaAfcAfcCfadTsdT | 509 | 94 |
| AM02255-AS | dTGfgGfaUfcCfaUfgguAfuAfaCfadTsdT | 510 | 95 |
| AM02256-AS | dTUfgGfaCfaUfuGfuguCfaGfgUfudTsdT | 511 | 96 |
| AM02257-AS | dTAfuUfcUfgUfcAfcugGfaCfaUfudTsdT | 512 | 97 |
| AM02258-AS | dTGfgUfgCfuUfgUfucaGfaAfaCfadTsdT | 513 | 98 |
| AM02259-AS | dTGfgAfgAfaUfgAfgccUfcGfaUfadTsdT | 514 | 99 |
| AM02260-AS | dTGfuGfgAfgAfaUfgagCfcUfcGfadTsdT | 515 | 100 |
| AM02261-AS | dTCfcGfuGfgGfaGfuugUfgAfgGfadTsdT | 516 | 101 |
| AM02262-AS | dTGfgAfcCfaCfcGfuggGfaGfuUfgdTsdT | 517 | 102 |
| AM02263-AS | dTUfgCfuUfgUfuCfagaAfgGfaGfcdTsdT | 518 | 103 |
| AM02264-AS | dTCfuGfaUfgCfcAfgugUfgGfuAfudTsdT | 519 | 104 |
| AM02265-AS | dTUfaGfgAfcAfcCfugaUfuCfuGfudTsdT | 520 | 105 |
| AM02266-AS | dTCfuCfuAfgGfaCfaccUfgAfuUfcdTsdT | 521 | 106 |
| AM02267-AS | dTUfcUfcUfaGfgAfcacCfuGfaUfudTsdT | 522 | 107 |
| AM02268-AS | dTGfuCfuCfuAfgGfacaCfcUfgAfudTsdT | 523 | 108 |
| AM02404-AS | dTsGfsaGfaAfuGfaGfcCfuCfgAfuAfaCfuCfsusuAu | 524 | 109 |
| AM02406-AS | dTsGfsaGfaAfuGfaGfccUfCfgAfuAfaCfuCfsusuAu | 525 | 109 |
| AM02408-AS | dTsGfsaGfaAfuGfaGfccUfcgAfuAfaCfuCfsusuAu | 526 | 109 |
| AM02410-AS | dTsGfsaGfaAfuGfaGfcCfUfcGfaUfaAfcUfcsUfsuAu | 527 | 109 |
| AM02412-AS | dTsGfsaCfaCfcUfgAfuUfcUfgUfuUfcUfgAfsgsuAu | 528 | 110 |
| AM02414-AS | dTsGfsaCfaCfcUfgAfuuCfUfgUfuUfcUfgAfsgsuAu | 529 | 110 |
| AM02416-AS | dTsGfsaCfaCfcUfgAfuuCfugUfuUfcUfgAfsgsuAu | 530 | 110 |
| AM02418-AS | dTsGfsaCfaCfcUfgAfuUfCfuGfuUfuCfuGfasGfsuAu | 531 | 110 |
| AM02531-AS | dTsCfsgUfaUfaAfcAfauaAfgGfgGfcUfgCfscsuAu | 532 | 111 |
| AM02532-AS | dTsGfscGfuCfuGfaGfcauUfgUfgUfcAfgGfsusuAu | 533 | 112 |
| AM02533-AS | dTsUfsgCfgUfcUfgAfgcaUfuGfuGfuCfaGfsgsuAu | 534 | 113 |
| AM02534-AS | dTsGfsaGfaAfuGfaGfccuCfgAfuAfaCfuCfsusuAu | 535 | 109 |
| 1532-AS00 | | | |
| AM02535-AS | dTsGfsaCfaCfcUfgAfuucUfgUfuUfcUfgAfsgsuAu | 536 | 110 |
| 1533-AS00 | | | |
| AM02536-AS | dTsAfsaGfgGfcGfaAfucuCfaGfcAfuCfuGfsgsuAu | 537 | 114 |
| AM02755-AS | usUfsaAfcAfaUfaAfgGfgGfcUfgCfAbs(PAZ) | 538 | 115 |
| AM02756-AS | usGfsuAfuAfaCfaAfuAfaGfgGfgCfAbs(PAZ) | 539 | 116 |
| AM02757-AS | usCfsgUfaUfaAfcAfaUfaAfgGfgGfAbs(PAZ) | 540 | 117 |
| AM02758-AS | usGfscGfuCfuGfaGfcAfuUfgUfgUfAbs(PAZ) | 541 | 118 |
| AM02759-AS | usUfsgCfgUfcUfgAfgCfaUfuGfuGfAbs(PAZ) | 542 | 119 |
| AM02760-AS | usCfsaGfgAfuCfuGfgAfuUfuCfgGfAbs(PAZ) | 543 | 120 |
| AM02761-AS | usUfsgCfaUfcUfgAfgCfaUfcGfuGfAbs(PAZ) | 544 | 121 |
| AM02762-AS | usCfsgAfcUfaUfgCfuGfgUfgUfgGfAbs(PAZ) | 545 | 122 |
| AM02763-AS | usUfsuUfcUfgGfgGfuCfcGfaCfuAfAbs(PAZ) | 546 | 123 |
| AM02764-AS | usGfscGfaAfuCfuCfaGfcAfuCfuGfAbs(PAZ) | 547 | 124 |
| AM02765-AS | usUfsgCfaAfgGfaCfaCfuUfgAfuUfAbs(PAZ) | 548 | 125 |
| AM02766-AS | usAfsaUfgAfgCfcUfcGfaUfaAfcUfAbs(PAZ) | 549 | 126 |
| AM02767-AS | usGfsaAfuGfaGfcCfuCfgAfuAfaCfAbs(PAZ) | 550 | 127 |
| AM02768-AS | usGfsaCfaUfuGfuGfuCfaGfgUfuGfAbs(PAZ) | 551 | 128 |
| AM02769-AS | usGfsaGfaAfuGfaGfcCfuCfgAfuAfAbs(PAZ) | 552 | 129 |
| AM02770-AS | usCfscAfuUfuGfgGfuAfgUfaUfuCfAbs(PAZ) | 553 | 130 |
| AM02771-AS | usCfsaCfcAfuUfuGfgGfuAfgUfaUfAbs(PAZ) | 554 | 131 |
| AM02772-AS | usGfsaCfaCfcUfgAfuUfcUfgUfuUfAbs(PAZ) | 555 | 132 |
| AM02773-AS | usGfsgAfcAfcCfuGfaUfuCfuGfuUfAbs(PAZ) | 556 | 133 |
| AM02774-AS | usUfsaAfcAfaUfaAfgGfgGfcUfgAbAbs(PAZ) | 557 | 134 |
| AM02775-AS | usGfsuAfuAfaCfaAfuAfaGfgGfgAbAbs(PAZ) | 558 | 135 |
| AM02776-AS | usCfsgUfaUfaAfcAfaUfaAfgGfgAbAbs(PAZ) | 559 | 136 |
| AM02777-AS | usGfscGfuCfuGfaGfcAfuUfgUfgAbAbs(PAZ) | 560 | 137 |
| AM02778-AS | usUfsgCfgUfcUfgAfgCfaUfuGfuAbAbs(PAZ) | 561 | 138 |
| AM02779-AS | usCfsaGfgAfuCfuGfgAfuUfuCfgAbAbs(PAZ) | 562 | 139 |
| AM02780-AS | usUfsgCfaUfcUfgAfgCfaUfcGfuAbAbs(PAZ) | 563 | 140 |
| AM02781-AS | usCfsgAfcUfaUfgCfuGfgUfgUfgAbAbs(PAZ) | 564 | 141 |
| AM02782-AS | usUfsuUfcUfgGfgGfuCfcGfaCfuAbAbs(PAZ) | 565 | 142 |
| AM02783-AS | usGfscGfaAfuCfuCfaGfcAfuCfuAbAbs(PAZ) | 566 | 143 |
| AM02784-AS | usUfsgCfaAfgGfaCfaCfuUfgAfuAbAbs(PAZ) | 567 | 144 |
| AM02785-AS | usAfsaUfgAfgCfcUfcGfaUfaAfcAbAbs(PAZ) | 568 | 145 |
| AM02786-AS | usGfsaAfuGfaGfcCfuCfgAfuAfaAbAbs(PAZ) | 569 | 146 |
| AM02787-AS | usGfsaCfaUfuGfuGfuCfaGfgUfuAbAbs(PAZ) | 570 | 147 |
| AM02788-AS | usGfsaGfaAfuGfaGfcCfuCfgAfuAbAbs(PAZ) | 571 | 148 |
| AM02789-AS | usCfscAfuUfuGfgGfuAfgUfaUfuAbAbs(PAZ) | 572 | 149 |
| AM02790-AS | usCfsaCfcAfuUfuGfgGfuAfgUfaAbAbs(PAZ) | 573 | 150 |
| AM02791-AS | usGfsaCfaCfcUfgAfuUfcUfgUfuAbAbs(PAZ) | 574 | 151 |
| AM02792-AS | usGfsgAfcAfcCfuGfaUfuCfuGfuAbAbs(PAZ) | 575 | 152 |
| AM02857-AS | usGfsaGfaAfuGfaGfccuCfgAfuAfaCfuCfsusuAu | 576 | 153 |
| 1532-AS14 | | | |
| AM02858-AS | usgsaGfaAfuGfaGfccuCfgAfuAfaCfuCfsusuAu | 577 | 153 |
| AM02859-AS | usgsaGfaAfuGfaGfccuCfgAfuAfaCfucsusuAu | 578 | 153 |
| AM02860-AS | usGfsaGfaAfuGfaGfccuCfgAfuAfaCfucsusuAu | 579 | 153 |
| AM02863-AS | usGfsaCfaCfcUfgAfuucUfgUfuUfcUfgAfsgsuAu | 580 | 154 |
| 1533-AS15 | | | |
| AM02864-AS | usgsaCfaCfcUfgAfuucUfgUfuUfcUfgAfsgsuAu | 581 | 154 |
| AM02865-AS | usgsaCfaCfcUfgAfuucUfgUfuUfcUfgasgsuAu | 582 | 154 |
| AM02866-AS | usGfsaCfaCfcUfgAfuucUfgUfuUfcUfgasgsuAu | 583 | 154 |
| AM02943-AS | usgsagaAfugaGfccuCfgAfuaaCfuCfsusuAu | 584 | 153 |
| AM02944-AS | usgsagaauGfagccuCfgauAfaCfuCfsusuAu | 585 | 153 |
| AM02945-AS | usgsagaauGfagccuCfgauAfacucsusuAu | 586 | 153 |
| AM02950-AS | usgsaCfaCfcUfgAfuucUfgUfuucUfgasgsuAu | 587 | 154 |
| AM02951-AS | usgsaCfaCfcUfgAfuucUfguuUfcugasgsuAu | 588 | 154 |
| AM02952-AS | usgsacaccugAfuucUfgUfuucUfgasgsuAu | 589 | 154 |
| AM03040-AS | usGfsAfcAfcCfUfgAfuucUfgUfuUfcUfgAfsgsuAu | 590 | 154 |
| AM03041-AS | usGfsAfcAfccUfgAfuucUfgUfuUfcUfgAfsgsuAu | 591 | 154 |
| AM03043-AS | usGfsaCfaCfCfUfgAfuucUfgUfuUfcUfgAfsgsuAu | 592 | 154 |
| AM03065-AS | dTsGfsaCfaCfcugauucUfgUfuUfcUfgAfsgsuAu | 593 | 110 |
| 1533-AS18 | | | |
| AM03066-AS | usGfsaCfaCfcugauucUfgUfuUfcUfgAfsgsuAu | 594 | 154 |
| 1533-AS03 | | | |
| AM03067-AS | dTsGfsaCfaCfcugauucUfgUfuucugasgsuAu | 595 | 110 |
| AM03068-AS | usGfsaCfaCfcugauucUfgUfuucugasgsuAu | 596 | 154 |
| AM03069-AS | dTsGfsaCfaCfcUfgAfuucUfgUfuucugasgsuAu | 597 | 110 |
| 1533-AS14 | | | |
| AM03070-AS | usGfsaCfaCfcUfgAfuucUfgUfuucugasgsuAu | 598 | 154 |
| 1533-AS29 | | | |
| AM03107-AS | usCfsgUfaUfaAfcAfauaAfgGfgGfcUfgCfscsuAu | 599 | 156 |
| AM03108-AS | usCfsgUfaUfaAfcAfauaAfgGfgGfcUfgcscsuAu | 600 | 156 |
| AM03119-AS | usGfsaGfaAfuGfaGfccuCfgAfuAfaCfuCMsTMsuAu | 601 | 155 |
| AM03120-AS | usGfsaGfaAfuGfaGfccuCfgAfuAfaCfuCMTMuAu | 602 | 155 |
| AM03121-AS | usGfsaGfaAfuGfaGfccuCfgAfuAfaCfucuuAu | 603 | 153 |
| AM03127-AS | usCfsgUfaUfaAfCfAfauaAfgGfgGfcUfgCfscsuAu | 604 | 156 |
| AM03129-AS | usCfsgUfaUfaAfCfAfauaAfgGfgGfcUfgcscsuAu | 605 | 156 |
| AM03130-AS | usGfsaGfaAfuGfaGfCfcuCfgAfuAfaCfuCfsusuAu | 606 | 153 |
| AM03131-AS | usGfsaGfaAfuGfaGfCfCfuCfgAfuAfaCfuCfsusuAu | 607 | 153 |
| AM03149-AS | usGfsagaAfugaGfccuCfgAfuaaCfuCfsusuAu | 608 | 153 |
| AM03150-AS | usGfsagaauGfagccuCfgauAfaCfuCfsusuAu | 609 | 153 |
| AM03151-AS | usGfsagaauGfagccuCfgauAfacucsusuAu | 610 | 153 |
| AM03255-AS | usGfsaGfaAfugaGfccuCfgauaaCfuCfsusuAu | 611 | 153 |
| 1532-AA26 | | | |
| AM03256-AS | usGfsagaaugagccuCfgauaaCfuCfsusuAu | 612 | 153 |
| AM03257-AS | usGfsagaaugagccuCfgauaacuCfsusuAu | 613 | 153 |
| AM03258-AS | usGfsagaaugagccuCfgauaaCfucsusuAu | 614 | 153 |
| AM03259-AS | usGfsagaaugagccuCfgauaacucsusuAu | 615 | 153 |
| AM03260-AS | usGfsaGfaAfugaGfccUfCfgauaaCfuCfsusuAu | 616 | 153 |
| AM03261-AS | usGfsagaaugagccUfCfgauaaCfuCfsusuAu | 617 | 153 |
| AM03262-AS | usGfsagaaugagccUfCfgauaacuCfsusuAu | 618 | 153 |
| AM03263-AS | usGfsagaaugagccUfCfgauaaCfucsusuAu | 619 | 153 |
| AM03264-AS | usGfsagaaugagccUfCfgauaacucsusuAu | 620 | 153 |
| AM03265-AS | usGfsaGfaAfugaGfcCfuCfgauaaCfuCfsusuAu | 621 | 153 |
| AM03266-AS | usGfsagaaugagcCfuCfgauaaCfuCfsusuAu | 622 | 153 |
| AM03267-AS | usGfsagaaugagcCfuCfgauaacuCfsusuAu | 623 | 153 |
| AM03268-AS | usGfsagaaugagcCfuCfgauaaCfucsusuAu | 624 | 153 |
| AM03269-AS | usGfsagaaugagcCfuCfgauaacucsusuAu | 625 | 153 |
| AM03270-AS | usGfsaGfaAfugaGfCfcuCfgauaaCfuCfsusuAu | 626 | 153 |
| AM03271-AS | usGfsagaaugagCfcuCfgauaaCfuCfsusuAu | 627 | 153 |
| AM03272-AS | usGfsagaaugagCfcuCfgauaacuCfsusuAu | 628 | 153 |
| AM03273-AS | usGfsagaaugagCfcuCfgauaaCfucsusuAu | 629 | 153 |
| AM03274-AS | usGfsagaaugagCfcuCfgauaacucsusuAu | 630 | 153 |
| AM03279-AS | usCfsgUfaUfaacaauaAfgGfgGfcUfgCfscsuAu | 631 | 156 |
| AM03280-AS | usCfsgUfaUfaAfcAfauaAfggggcUfgCfscsuAu | 632 | 156 |
| AM03281-AS | usCfsguauaAfcAfauaAfgGfgGfcUfgCfscsuAu | 633 | 156 |
| AM03282-AS | usCfsgUfaUfaAfcAfauaAfgGfgGfcugcscsuAu | 634 | 156 |
| AM03283-AS | usCfsgUfaUfaacaauaAfgGfgGfcugcscsuAu | 635 | 156 |
| AM03284-AS | usCfsguauaAfcAfauaAfggggcUfgCfscsuAu | 636 | 156 |
| AM03300-AS | usCfsgUfaUfaacaaUfaAfgGfgGfcUfgCfscsuAu | 637 | 156 |
| AM03301-AS | usCfsguauaAfcAfaUfaAfggggcUfgCfscsuAu | 638 | 156 |
| AM03331-AS | usGfsaGfaAfuGfaGfcCfuCfgAfuAfasdTsdT | 639 | 157 |
| AM03375-AS | usCfsguauaAfcAfauaAfggggcugcscsuAu | 640 | 156 |
| AM03376-AS | usCfsguauaacaauaAfggggcugcscsuAu | 641 | 156 |
| AM03377-AS | usGfsagaauGfaGfccuCfgauaacucsusuAu | 642 | 153 |
| AM03427-AS | dTsGfaGfaAfuGfaGfccuCfgAfuAfaCfuCfuuAu | 643 | 109 |
| AM03486-AS | vpdTGfsaGfaAfuGfaGfccuCfgAfuAfaCfucsusuAu | 644 | 109 |
| AM03487-AS | vpdTsGfsaGfaAfuGfaGfccuCfgAfuAfaCfucsusuAu | 645 | 109 |
| AM03488-AS | dTsGfsaGfaAfuGfaGfccuCfgAfuAfaCfucsusuAu | 646 | 109 |
| AM03490-AS | vpdTCfsgUfaUfaAfcAfauaAfgGfgGfcUfgCfscsuAu | 647 | 111 |
| AM03491-AS | vpdTsCfsgUfaUfaAfcAfauaAfgGfgGfcUfgCfscsuAu | 648 | 111 |
| AM03655-AS | usGfsAfgaaugagccuCfgauaacucsusuAu | 649 | 153 |
| AM03656-AS | usGfsaGfaaugagccuCfgauaacucsusuAu | 650 | 153 |
| AM03657-AS | usGfsagAfaugagccuCfgauaacucsusuAu | 651 | 153 |
| AM03658-AS | usGfsagaAfugagccuCfgauaacucsusuAu | 652 | 153 |
| AM03659-AS | usGfsagaaUfgagccuCfgauaacucsusuAu | 653 | 153 |
| AM03660-AS | usGfsagaauGfagccuCfgauaacucsusuAu | 654 | 153 |
| AM03661-AS | usGfsagaaugaGfccuCfgauaacucsusuAu | 655 | 153 |
| AM03671-AS | usCfsgUfaUfaAfcAfauaAfgGfcGfcUfgCfscsuAu | 656 | 158 |
| AM03672-AS | usCfsgUfaUfaAfcAfauaAfggggCfugCfscsuAu | 657 | 156 |
| AM03673-AS | usCfsgUfaUfaAfcAfauaAfggggcugcscsuAu | 658 | 156 |
| AM03674-AS | usCfsGfuauaAfcAfauaAfggggcugcscsuAu | 659 | 156 |
| AM03675-AS | usCfsgUfaUfaAfcaauaAfggggcugcscsuAu | 660 | 156 |
| AM03676-AS | usCfsgUfaUfaaCfaauaAfggggcugcscsuAu | 661 | 156 |
| AM03677-AS | usCfsGfuauAfaCfaauaAfggggcugcscsuAu | 662 | 156 |
| AM03678-AS | usGfsaGfaAfuGfaGfccuCfgauaacucsusuAu | 663 | 153 |
| AM03679-AS | usGfsAfgaAfuGfaGfccuCfgauaacucsusuAu | 664 | 153 |
| AM03680-AS | usGfsAfgAfauGfaGfcCfuCfgauaacucsusuAu | 665 | 153 |
| AM03681-AS | usGfsAfgAfauGfagCfCfuCfgauaacucsusuAu | 666 | 153 |
| AM03682-AS | usGfsaGfaAfuGfagccuCfgauaacucsusuAu | 667 | 153 |
| AM03744-AS | usGfsuauaaCfaAfuaaGfgggAbAbs(PAZ) | 668 | 135 |
| AM03745-AS | usGfsuAfuAfaCfaAfuAfaGfgGMGMAbAbs(PAZ) | 669 | 135 |
| AM03749-AS | usCfsguauaAfcAfauaAfgggAbAbs(PAZ) | 670 | 136 |
| AM03750-AS | usCfsgUfaUfaAfcAfaUfaAfgGMGMAbAbs(PAZ) | 671 | 136 |
| AM03754-AS | usGfsagaauGfaGfccuCfgauAbAbs(PAZ) | 672 | 148 |
| AM03755-AS | usGfsagaaugagcCfuCfgauAbAbs(PAZ) | 673 | 148 |
| AM03756-AS | usGfsaGfaAfuGfaGfcCfuCfgAMTMAbAbs(PAZ) | 674 | 159 |
| AM03760-AS | usGfsacaccUfgAfuucUfguuAbAbs(PAZ) | 675 | 151 |
| AM03761-AS | usGfsaCfaCfcugauucUfguuAbAbs(PAZ) | 676 | 151 |
| AM03762-AS | usGfsaCfaCfcUfgAfuUfcUfgTMTMAbAbs(PAZ) | 677 | 160 |
| AM03823-AS | usCfANAsgUfaUfaAfCfAfauaAfgGfgGfcUfgcscsuAu | 678 | 156 |
| AM03824-AS | usCfsgUf_{ANA}aUfaAfCfAfauaAfgGfgGfcUfgcscsuAu | 679 | 156 |
| AM03825-AS | usCfsgUfaUf_{ANA}aAfCfAfauaAfgGfgGfcUfgcscsuAu | 680 | 156 |
| AM03826-AS | usCfsgUfaUfaAf_{ANA}CfAfauaAfgGfgGfcUfgcscsuAu | 681 | 156 |
| AM03827-AS | usGf_{ANA}sagaauGfaGfccuCfgauaacucsusuAu | 682 | 153 |
| AM03828-AS | usGfsagaauGf_{ANA}aGfccuCfgauaacucsusuAu | 683 | 153 |
| AM03856-AS | TMsGfsagaauGfaGfccuCfgauaacucsusuAu | 684 | 109 |
| AM03857-AS | TMsCfsgUfaUfaAfCfAfauaAfgGfgGfcUfgcscsuAu | 685 | 111 |
| AM03862-AS | TMsGfsagaaugagccuCfgauaacucsusuAu | 686 | 109 |
| AM03866-AS | usCfsgUfaUfaacaauaAfggggcugcscsuAu | 687 | 156 |
| AM03867-AS | usCfsgUfauaAfcaauaAfggggcugcscsuAu | 688 | 156 |
| AM03868-AS | usCfsgUfauaacAfauaAfggggcugcscsuAu | 689 | 156 |
| AM03869-AS | usCfsgUfauaacaaUfaAfggggcugcscsuAu | 690 | 156 |
| AM03870-AS | usCfsguaUfaAfcaauaAfggggcugcscsuAu | 691 | 156 |
| AM03871-AS | usCfsguaUfaacAfauaAfggggcugcscsuAu | 692 | 156 |
| AM03872-AS | usCfsguaUfaacaaUfaAfggggcugcscsuAu | 693 | 156 |
| AM03873-AS | usCfsguauaAfcaaUfaAfggggcugcscsuAu | 694 | 156 |
| AM03874-AS | usCfsguauaacAfaUfaAfggggcugcscsuAu | 695 | 156 |
| AM03875-AS | usCfsgUfaUfaAfcAfaUfaAfgggGfcUfgCfscsuAu | 696 | 156 |
| AM03876-AS | usCfsgUfaUfaAfcAfaUfaAfgGfggcUfgCfscsuAu | 697 | 156 |
| AM03877-AS | usCfsgUfaUfaAfcAfaUfaAfgGfgGfcugCfscsuAu | 698 | 156 |
| AM03878-AS | usCfsgUfaUfaAfcAfaUfaAfgGfgGfcUfgcscsuAu | 699 | 156 |
| AM03883-AS | vpusCfsgsUfaUfaAfCfAfauaAfgGfgGfcUfgasusu | 700 | 161 |
| AM03884-AS | vpusCfsgsUfaUfaAfCfAfauaAfgGfgGfcUfgcsusu | 701 | 162 |
| AM03885-AS | vpusGfsasgaauGfaGfccuCfgauaacucsusu | 702 | 163 |
| AM03929-AS | usCfsguaUfaAfcaauaAfgGfggcugcscsuAu | 703 | 156 |
| AM03930-AS | usCfsguaUfaAfCfaauaAfgGfggcugcscsuAu | 704 | 156 |
| AM03932-AS | usGfsagaAfuGfagccuCfgAfuaacucsusuAu | 705 | 153 |
| AM03933-AS | usGfsagaAfuGfAfgccuCfgAfuaacucsusuAu | 706 | 153 |
| AM03969-AS | vpusCfsgUfaUfaAfCfAfauaAfgGfgGfcUfgcscsuAu | 707 | 156 |
| AM03971-AS | vpusCfsgsUfaUfaAfCfAfauaAfgGfgGfcusu | 708 | 164 |
| AM03972-AS | usCfsgsUfaUfaAfCfAfauaAfgGfgGfcusu | 709 | 164 |
| AM03973-AS | U_{UNA}sCfsgsUfaUfaAfCfAfauaAfgGfgGfcusu | 710 | 164 |
| AM04132-AS | usGfsaGfaAfuGfaGfccuCfgAfuAfaCfucsusuau | 711 | 153 |
| AM04133-AS | usGfsagaauGfaGfccuCfgauaacucsusuau | 712 | 153 |
| AM04134-AS | usGfsaGfaAfuGfAfGfccuCfgAfuAfaCfucsusuau | 713 | 153 |
| AM04135-AS | usGfsagaauGfAfGfccuCfgauaacucsusuau | 714 | 153 |
| AM04136-AS | usGfsaGfaAfuGfAfgccuCfgAfuAfaCfucsusuau | 715 | 153 |
| AM04137-AS | usGfsagaauGfAfgccuCfgauaacucsusuau | 716 | 153 |
| AM04150-AS | usGfsagaauGfaGfccuCfgauaacucsusuau(Dy540) | 717 | 153 |
| AM04215-AS | usCfsgUfaUfaaCfaaUfaAfgGfgGfcUfgCfscsuAu | 718 | 156 |
| AM04216-AS | usCfsguauaAfcaaUfaAfggggcugCfscsuAu | 719 | 156 |
| AM04217-AS | usCfsguauaaCfaaUfaAfggggcugCfscsuAu | 720 | 156 |
| AM04218-AS | usCfsguauaaCfaaUfaAfggggCfugCfscsuAu | 721 | 156 |
| AM04219-AS | usCfsguaUfaaCfaaUfaAfggggCfugCfscsuAu | 722 | 156 |
| AM04250-AS | usGfsuAfuAfaCfaAfuAfaGfgGMGMsAbsAbs(PAZ) | 723 | 135 |
| AM04251-AS | usGfsuAfuAfaCfaAfuAfaGfgGMGM(Sp18)s(PAZ) | 724 | 165 |
| AM04252-AS | usGfsuAfuAfaCfaAfuAfaGfgGMGM(C12)s(PAZ) | 725 | 165 |
| AM04253-AS | usCfsgUfaUfaAfcAfaUfaAfgGMGMsAbsAbs(PAZ) | 726 | 136 |
| AM04254-AS | usCfsgUfaUfaAfcAfaUfaAfgGMGM(Sp18)s(PAZ) | 727 | 166 |
| AM04255-AS | usCfsgUfaUfaAfcAfaUfaAfgGMGM(C12)s(PAZ) | 728 | 166 |
| AM04256-AS | usGfsaGfaAfuGfaGfcCfuCfgAMTMsAbsAbs(PAZ) | 729 | 159 |
| AM04257-AS | usGfsaGfaAfuGfaGfcCfuCfgAMTM(Sp18)s(PAZ) | 730 | 167 |
| AM04258-AS | usGfsaGfaAfuGfaGfcCfuCfgAMTM(C12)s(PAZ) | 731 | 167 |
| AM04259-AS | usGfsaCfaCfcUfgAfuUfcUfgTMTMsAbsAbs(PAZ) | 732 | 160 |
| AM04260-AS | usGfsaCfaCfcUfgAfuUfcUfgTMTM(Sp18)s(PAZ) | 733 | 168 |
| AM04261-AS | usGfsaCfaCfcUfgAfuUfcUfgTMTM(C12)s(PAZ) | 734 | 168 |
| AM04377-AS | dTusCfsgUfaUfaacaaUfaAfgGfgGfcUfgCfscsua | 735 | 169 |
| AM04378-AS | uAusCfsgUfaUfaacaaUfaAfgGfgGfcUfgCfscsu | 736 | 170 |
| AM04379-AS | dTcsCfsgUfaUfaacaaUfaAfgGfgGfcUfgCfscsua | 737 | 171 |
| AM04380-AS | cUcsCfsgUfaUfaacaaUfaAfgGfgGfcUfgCfscsu | 738 | 172 |
| AM04383-AS | dTusGfsaGfaAfuGfaGfccuCfgAfuAfaCfucsusua | 739 | 173 |
| AM04384-AS | uAusGfsaGfaAfuGfaGfccuCfgAfuAfaCfucsusu | 740 | 174 |
| AM04385-AS | dTgsGfsaGfaAfuGfaGfccuCfgAfuAfaCfucsusua | 741 | 175 |
| AM04386-AS | gUgsGfsaGfaAfuGfaGfccuCfgAfuAfaCfucsusu | 742 | 176 |
| AM04387-AS | dTusGfsagaauGfaGfccuCfgauaacucsusua | 743 | 173 |
| AM04388-AS | uAusGfsagaauGfaGfccuCfgauaacucsusu | 744 | 174 |
| AM04389-AS | dTgsGfsagaauGfaGfccuCfgauaacucsusua | 745 | 175 |
| AM04390-AS | gUgsGfsagaauGfaGfccuCfgauaacucsusu | 746 | 176 |
| AM04413-AS | usCfsgsUfaUfaacaaUfaAfgGfgGfcusu | 747 | 164 |
| AM04415-AS | usGfsasGfaAfuGfaGfccuCfgAfuAfausu | 748 | 177 |
| AM04437-AS | usGfsuAfuAfaCfaAfuAfaGfgGMGMs(C12)s(PAZ) | 749 | 165 |
| AM04438-AS | usCfsgUfaUfaAfcAfaUfaAfgGMGMs(C12)s(PAZ) | 750 | 166 |
| AM04439-AS | usGfsaGfaAfuGfaGfcCfuCfgAMTMs(C12)s(PAZ) | 751 | 167 |
| AM04440-AS | usGfsaCfaCfcUfgAfuUfcUfgTMTMs(C12)s(PAZ) | 752 | 168 |
| AM04501-AS | cPrpTMsCfsgsUfaUfaAfCfAfauaAfgGfgGfcusu | 753 | 178 |
| AM04507-AS | usGfsasGfaAfuGfaGfccuCfgAfuAfausuAUAUA | 754 | 179 |
| AM04539-AS | usCfsgUfaUfaacaaUfaAfgGfgGfcUfgsCfscuAu | 755 | 156 |
| AM04540-AS | usCfsgUfaUfaacaaUfaAfgGfgGfcUfgsCfcuAu | 756 | 156 |
| AM04541-AS | usGfsaGfaAfuGfaGfccuCfgAfuAfaCfuscsuuAu | 757 | 153 |
| AM04542-AS | usGfsaGfaAfuGfaGfccuCfgAfuAfaCfuscuuAu | 758 | 153 |
| AM04544-AS | usCfsgsUfaUfaAfCfAfauaAfgGfgGfcUfgcsusu | 759 | 162 |
| AM04545-AS | usCfsgsUfaUfaAfCfAfauaagGfgGfcusu | 760 | 164 |
| AM04546-AS | usCfsgsUfaUfaAfCfAfaUfaagGfgGfcusu | 761 | 164 |
| AM04582-AS | usCfsgUfaUfaacaaUfaAfgGfgGfcUfgsCfsc | 762 | 180 |
| AM04583-AS | dTusCfsgUfaUfaacaaUfaAfgGfgGfcUfgsCfsc | 763 | 181 |
| AM04584-AS | dTusCfsgUfaUfaacaaUfaAfgGfgGfcUfgscsc | 764 | 181 |
| AM04585-AS | dTusCfsgsUfaUfaacaaUfaAfgGfgGfcUfgscsc | 765 | 181 |
| AM04586-AS | dTusCfsgsUfaUfaacaaUfaAfgGfgGfcUfgcsc | 766 | 181 |
| AM04587-AS | dTusCfsgsUfaUfaacaaUfaAfgGfgGfcusg | 767 | 182 |
| AM04609-AS | epTcPrsCfsgsUfaUfaAfCfAfauaAfgGfgGfcusu | 768 | 178 |
| AM04610-AS | epTMsCfsgsUfaUfaAfCfAfauaAfgGfgGfcusu | 769 | 178 |
| AM04677-AS | usGfsaGfaAfuGfaGfccuCfgAfuAfaCfsuscuuAu | 770 | 153 |
| AM04678-AS | usGfsaGfaAfuGfaGfccuCfgAfuAfasCfsucuuAu | 771 | 153 |
| AM04679-AS | usGfsaGfaAfuGfaGfccuCfgAfuAfaCfuasuscGc | 772 | 183 |
| AM04680-AS | usGfsaGfaAfuGfaGfccuCfgAfuAfaCfuasusuCa | 773 | 184 |
| AM04681-AS | usGfsaGfaAfuGfaGfccuCfgAfuAfaCfuascsgAu | 774 | 185 |
| AM04733-AS | us(5Me-Gf)saGfaAfuGfaGfccuCfgAfuAfaCfucsusuAu | 775 | 153 |
| AM04734-AS | usGfsa(5Me-Gf)aAfuGfaGfccuCfgAfuAfaCfucsusuAu | 776 | 153 |
| AM04735-AS | usGfsaGfaAfu(5Me-Gf)aGfccuCfgAfuAfaCfucsusuAu | 777 | 153 |
| AM04736-AS | usGfsaGfaAfuGfa(5Me-Gf)ccuCfgAfuAfaCfucsusuAu | 778 | 153 |
| AM04805-AS | vpusCfsgsUfaUfaAfCfAfauaAfgGfgGfcgsu | 779 | 186 |
| AM04821-AS | usCfsgUfaUfaacaaUfaAfgGfgGfcUfgCfscsu | 780 | 187 |
| AM04822-AS | usCfsgUfaUfaacaaUfaAfgGfgGfcUfgCfsusu | 781 | 162 |
| AM04823-AS | vpusCfsgUfaUfaacaaUfaAfgGfgGfcUfgCfscsu | 782 | 187 |
| AM04824-AS | vpusCfsgUfaUfaacaaUfaAfgGfgGfcUfgCfsusu | 783 | 162 |
| AM04871-AS | usGfsaGfaAfuGfAfgccuCfgAfuAfaCfusCfsuuAu | 784 | 153 |
| AM04872-AS | cPrpusGfsaGfaAfuGfaGfccuCfgAfuAfaCfucsusuAu | 785 | 153 |
| AM04873-AS | cPrpusCfsgUfaUfaacaaUfaAfgGfgGfcUfgCfscsuAu | 786 | 156 |
| AM04874-AS | usCfsgUfaUfaacaaUfaAfgGfgGfcsusu | 787 | 164 |
| AM04875-AS | cPrpusCfsgUfaUfaacaaUfaAfgGfgGfcsusu | 788 | 164 |
| AM04876-AS | usCfsgUfaUfaacaaUfaAfgGfgGfcsusg | 789 | 188 |
| AM04877-AS | usCfsgUfaUfaacaaUfaAfgGfgGfcsUfsg | 790 | 188 |
| AM04878-AS | cPrpusCfsgUfaUfaacaaUfaAfgGfgGfcUfgCfsusu | 791 | 162 |
| AM04879-AS | usGfsaGfaAfuGfaGfcCfuCfgAfuAfaCfucsusuAu | 792 | 153 |
| AM04880-AS | cPrpusGfsaGfaAfuGfaGfcCfuCfgAfuAfaCfucsusuAu | 793 | 153 |
| AM04969-AS | cPrpTMsGfsaGfaAfuGfaGfcCfuCfgAfuAfaCfucsusuAu | 794 | 109 |
| AM04970-AS | cPrpTMsCfsgUfaUfaacaaUfaAfgGfgGfcUfgCfscsuAu | 795 | 111 |
| AM04971-AS | cPrpTMsCfsgUfaUfaacaaUfaAfgGfgGfcsusu | 796 | 178 |
| AM04972-AS | cPrpTMsCfsgUfaUfaacaaUfaAfgGfgGfcUfgCfsusu | 797 | 189 |
| AM04979-AS | usCfsgsUfaUfaAfcAfaUfaAfgGfgGfcusu | 798 | 164 |
| 1532-AS01 | usgsagaaugaGfccuCfgAfuAfaCfuCfsusuAu | 799 | 153 |
| 1532-AS02 | usgsagaauGfagccuCfgAfuAfaCfuCfsusuAu | 800 | 153 |
| 1532-AS03 | usgsagaAfugagccuCfgAfuAfaCfuCfsusuAu | 801 | 153 |
| 1532-AS04 | usgsaGfaaugagccuCfgAfuAfaCfuCfsusuAu | 802 | 153 |
| 1532-AS05 | usGfsagaaugagccuCfgAfuAfaCfuCfsusuAu | 803 | 153 |
| 1532-AS06 | dTsgsagaaugagccuCfgAfuAfaCfuCfsusuAu | 804 | 109 |
| 1532-AS07 | dTsGfsaGfaAfugagccuCfgAfuAfaCfuCfsusuAu | 805 | 109 |
| 1532-AS08 | dTsGfsaGfaAfugaGfccuCfgauAfaCfuCfsusuAu | 806 | 109 |
| 1532-AS09 | dTsGfsaGfaAfuGfagccuCfgauAfaCfuCfsusuAu | 807 | 109 |
| 1532-AS10 | dTsGfsaGfaAfugagccuCfgauAfaCfuCfsusuAu | 808 | 109 |
| 1532-AS11 | dTsGfsaGfaAfugagccuCfgAfuaaCfuCfsusuAu | 809 | 109 |
| 1532-AS12 | dTsGfsaGfaAfugaGfccuCfgauaaCfuCfsusuAu | 810 | 109 |
| 1532-AS13 | dTsGfsaGfaAfuGfagccuCfgauaaCfuCfsusuAu | 811 | 109 |
| 1532-AS15 | dTsgsagaaugaGfccuCfgAfuAfaCfuCfsusuAu | 812 | 109 |
| 1532-AS16 | dTsgsagaauGfagccuCfgAfuAfaCfuCfsusuAu | 813 | 109 |
| 1532-AS17 | dTsgsagaAfugagccuCfgAfuAfaCfuCfsusuAu | 814 | 109 |
| 1532-AS18 | dTsgsaGfaaugagccuCfgAfuAfaCfuCfsusuAu | 815 | 109 |
| 1532-AS19 | dTsGfsagaaugagccuCfgAfuAfaCfuCfsusuAu | 816 | 109 |
| 1532-AS20 | usgsagaaugagccuCfgAfuAfaCfuCfsusuAu | 817 | 153 |
| 1532-AS21 | usGfsaGfaAfugagccuCfgAfuAfaCfuCfsusuAu | 818 | 153 |
| 1532-AS22 | usGfsaGfaAfugaGfccuCfgauAfaCfuCfsusuAu | 819 | 153 |
| 1532-AS23 | usGfsaGfaAfuGfagccuCfgauAfaCfuCfsusuAu | 820 | 153 |
| 1532-AS24 | usGfsaGfaAfugagccuCfgauAfaCfuCfsusuAu | 821 | 153 |
| 1532-AS25 | usGfsaGfaAfugagccuCfgAfuaaCfuCfsusuAu | 822 | 153 |
| 1532-AS27 | usGfsaGfaAfuGfagccuCfgauaaCfuCfsusuAu | 823 | 153 |
| 1533-AS01 | usgsaCfaCfcugAfuucUfgUfuUfcUfgAfsgsuAu | 824 | 154 |
| 1533-AS02 | usgsaCfaCfcUfgauucUfgUfuUfcUfgAfsgsuAu | 825 | 154 |
| 1533-AS04 | dTsgsaCfaCfcugauucUfgUfuUfcUfgAfsgsuAu | 826 | 110 |
| 1533-AS05 | dTsGfsaCfaCfcugAfuucUfguuUfcUfgAfsgsuAu | 827 | 110 |
| 1533-AS06 | dTsGfsaCfaCfcUfgauucUfguuUfcUfgAfsgsuAu | 828 | 110 |
| 1533-AS07 | dTsGfsaCfaCfcUfgauucUfgUfuucUfgAfsgsuAu | 829 | 110 |
| 1533-AS08 | dTsGfsaCfaCfcUfgAfuucUfguuucUfgAfsgsuAu | 830 | 110 |
| 1533-AS09 | dTsGfsaCfaCfcUfgAfuucUfguuUfcugAfsgsuAu | 831 | 110 |
| 1533-AS10 | dTsGfsaCfaCfcUfgAfuucUfgUfuucugAfsgsuAu | 832 | 110 |
| 1533-AS11 | dTsGfsaCfaCfcUfgAfuucUfguuucugAfsgsuAu | 833 | 110 |
| 1533-AS12 | dTsGfsaCfaCfcUfgAfuucUfguuucUfgasgsuAu | 834 | 110 |
| 1533-AS13 | dTsGfsaCfaCfcUfgAfuucUfguuUfcugasgsuAu | 835 | 110 |
| 1533-AS16 | dTsgsaCfaCfcugAfuucUfgUfuUfcUfgAfsgsuAu | 836 | 110 |
| 1533-AS17 | dTsgsaCfaCfcUfgauucUfgUfuUfcUfgAfsgsuAu | 837 | 110 |
| 1533-AS19 | usgsaCfaCfcugauucUfgUfuUfcUfgAfsgsuAu | 838 | 154 |
| 1533-AS20 | usGfsaCfaCfcugAfuucUfguuUfcUfgAfsgsuAu | 839 | 154 |
| 1533-AS21 | usGfsaCfaCfcUfgauucUfguuUfcUfgAfsgsuAu | 840 | 154 |
| 1533-AS22 | usGfsaCfaCfcUfgauucUfgUfuucUfgAfsgsuAu | 841 | 154 |
| 1533-AS23 | usGfsaCfaCfcUfgAfuucUfguuucUfgAfsgsuAu | 842 | 154 |
| 1533-AS24 | usGfsaCfaCfcUfgAfuucUfguuUfcugAfsgsuAu | 843 | 154 |
| 1533-AS25 | usGfsaCfaCfcUfgAfuucUfgUfuucugAfsgsuAu | 844 | 154 |
| 1533-AS26 | usGfsaCfaCfcUfgAfuucUfguuucugAfsgsuAu | 845 | 154 |
| 1533-AS27 | usGfsaCfaCfcUfgAfuucUfguuucUfgasgsuAu | 846 | 154 |
| 1533-AS28 | usGfsaCfaCfcUfgAfuucUfguuUfcugasgsuAu | 847 | 154 |
| 1533-CfinAS | dTsGfsacaccUfgAfuucUfgUfuUfcUfgAfsgsuAu | 848 | 110 |
| AM05490-AS | usGfsasGfaAfuGfaGfcCfuCfgAfuAfausu | 1262 | 177 |
| AM05492-AS | cPrpTMsCfsgsUfaUfaAfCfAfaUfaAfgGfgGfcusu | 1263 | 178 |
| AM05493-AS | cPrpTMsCfsgsUfaUfaAfcAfaUfaAfgGfgGfcusu | 1264 | 178 |
| AM05495-AS | usCfsguauaaCfaaUfaAfgggGfcugCfscsuAu | 1265 | 156 |
| AM05496-AS | usCfsguaUfaaCfaaUfaAfgggGfcugCfscsuAu | 1266 | 156 |
| AM05497-AS | usCfsgUfaUfaacaaUfaAfgGfgGfcsUfsu | 1267 | 164 |
| AM05498-AS | usCfsgsUfaUfaAfCfAfaUfaAfgGfgGfcusu | 1268 | 164 |

TABLE 2B
LPA RNAi agent sense strands having modified nucleotides.

| Sense | | SEQ | SEQ |
|---|---|---|---|
| Strand ID | SS Sequence 5′ → 3′ | ID NO. | ID NO. |
| AM01173-SS | AfcGfcAfgAfaGfgGfaCfuGfcCfgAf(invdT) | 849 | 190 |
| AM01174-SS | GfgGfgUfgCfaGfgAfgUfgCfuAfcAf(invdT) | 850 | 191 |
| AM01175-SS | CfuGfuGfgCfaGfcCfcCfuUfaUfuAf(invdT) | 851 | 192 |
| AM01176-SS | GfgCfaGfcCfcCfuUfaUfuGfuUfaAf(invdT) | 852 | 193 |
| AM01177-SS | AfgCfcCfcUfuAfuUfgUfuAfuAfcAf(invdT) | 853 | 194 |
| AM01178-SS | GfcCfcCfuUfaUfuGfuUfaUfaCfgAf(invdT) | 854 | 195 |
| AM01179-SS | UfgAfcAfcAfaUfgCfuCfaGfaCfgAf(invdT) | 855 | 196 |
| AM01180-SS | GfaCfaCfaAfuGfcUfcAfgAfcGfcAf(invdT) | 856 | 197 |
| AM01181-SS | AfcAfcAfaUfgCfuCfaGfaCfgCfaAf(invdT) | 857 | 198 |
| AM01182-SS | AfcAfaUfgCfuCfaGfaCggCfaGfaAf(invdT) | 858 | 199 |
| AM01183-SS | CfuGfcCfgAfaAfuCfvAfgAfuCfcAf(invdT) | 859 | 200 |
| AM01184-SS | GfcCfgAfaAfuCfcAfgAfuCfcUfgAf(invdT) | 860 | 201 |
| AM01185-SS | UfgAfcAfcGfaUfgCfuCfaGfaUfgAf(invdT) | 861 | 202 |
| AM01186-SS | GfaCfaCfgAfuGfcUfcAfgAfuGfcAf(invdT) | 862 | 203 |
| AM01187-SS | AfcAfcGfaUfgCfuCfaGfaUfgCfaAf(invdT) | 863 | 204 |
| AM01188-SS | AfcGfaUfgCfuCfaGfaUfgCfaGfaAf(invdT) | 864 | 205 |
| AM01189-SS | UfcCfaAfgCfcUfaGfaGfgCfuUfuAf(invdT) | 865 | 206 |
| AM01190-SS | AfgGfaAfaCfcCfvCfgGfgGfuAfcAf(invdT) | 866 | 207 |
| AM01191-SS | GfgAfaAfcCfcCfcGfgGfgUfaCfaAf(invdT) | 867 | 208 |
| AM01192-SS | GfaAfaCfcCfcCfgGfgGfuAfcAfgAf(invdT) | 868 | 209 |
| AM01193-SS | UfgCfuAfcUfaCfcAfuUfaUfgGfaAf(invdT) | 869 | 210 |
| AM01194-SS | GfcUfaCfuAfcCfaUfuAfuGfgAfcAf(invdT) | 870 | 211 |
| AM01195-SS | CfuAfcCfaUfuAfuGfgAfcAfgAfgAf(invdT) | 871 | 212 |
| AM01196-SS | AfcCfaCfaCfcAfgCfaUfaGfuCfgAf(invdT) | 872 | 213 |
| AM01197-SS | CfcAfcAfcCfaGfcAfuAfgUfcGfgAf(invdT) | 873 | 214 |
| AM01198-SS | CfaCfaCfcAfgCdaUfaGfuCfgGfaAf(invdT) | 874 | 215 |
| AM01199-SS | CfaCfcAfgCfaUfaGfuCfgGfaCfcAf(invdT) | 875 | 216 |
| AM01200-SS | AfuAfgUfcGfgAfcCfvCfaGfaAfaAf(invdT) | 876 | 217 |
| AM01201-SS | UfaGfuCfgGfaCfcCfcAfgAfaAfaAf(invdT) | 877 | 218 |
| AM01202-SS | CfcAfgAfuGfcUfgAfgAfuUfcGfcAf(invdT) | 878 | 219 |
| AM01203-SS | GfcUfgAfgAfuUfcGfcCfcUfuGfgAf(invdT) | 879 | 220 |
| AM01204-SS | CfuGfaGfaUfuCfgCfcCfuUfgGfuAf(invdT) | 880 | 221 |
| AM01205-SS | UfgAfgAfuUfcGfcCfcUfuGfgUfgAf(invdT) | 881 | 222 |
| AM01206-SS | GfaGfaUfuCfgCfvCfuUfgGfuGfuAf(invdT) | 882 | 223 |
| AM01207-SS | AfuGfgAfuCfvCfaGfuGfuCfaGfgAf(invdT) | 883 | 224 |
| AM01208-SS | GfaAfuCfaAfgUfgUfcCfuUfgCfaAf(invdT) | 884 | 225 |
| AM01209-SS | AfaUfcAfaGfuGfuCfcUfuGfcAfaAf(invdT) | 885 | 226 |
| AM01210-SS | GfaAfgCfaCfcAfaCfgGfaGfcAfaAf(invdT) | 886 | 227 |
| AM01211-SS | GfaGfuUfaUfcGfaGfgCfuCfaUfuAf(invdT) | 887 | 228 |
| AM01212-SS | AfgUfuAfuCfgAfgGfcUfcAfuUfcAf(invdT) | 888 | 229 |
| AM01213-SS | GfaCfaAfcAfgAfaUfaUfuAfuCfcAf(invdT) | 889 | 230 |
| AM01214-SS | CfuUfgGfuGfuUfaUfaCfcAfuGfgAf(invdT) | 890 | 231 |
| AM01215-SS | GfgUfgUfuAfuAfcCfaUfgGfaUfcAf(invdT) | 891 | 232 |
| AM01216-SS | UfaUfaCfcAfuGfgAfuCfvCfaAfuAf(invdT) | 892 | 233 |
| AM01217-SS | AfuAfcCfaUfgGfaUfcCfcAfaUfgAf(invdT) | 893 | 234 |
| AM01218-SS | UfaCfcAfuGfgAfuCfcCfaAfuGfuAf(invdT) | 894 | 235 |
| AM01219-SS | AfcCfaUfgGfaUfcCfcAfaUfgUfcAf(invdT) | 895 | 236 |
| AM01220-SS | GfcAfaCfcUfgAfcAfcAfaUfgUfcAf(invdT) | 896 | 237 |
| AM01221-SS | CfuGfaCfaCfaAfuGfuCfcAfgUfgAf(invdT) | 897 | 238 |
| AM01222-SS | CfcAfgUfgAfcAfgAfaUfcAfaGfuAf(invdT) | 898 | 239 |
| AM01223-SS | UfuAfuCfgAfgGfcUfcAfuUfcUfcAf(invdT) | 899 | 240 |
| AM01224-SS | AfgAfaUfaCfuAfcCfcAfaAfuGfgAf(invdT) | 900 | 241 |
| AM01225-SS | AfaUfaCfuAfcCfcAfaAfuGfgUfgAf(invdT) | 901 | 242 |
| AM01226-SS | AfuAfcUfaCfcCfaAfaUfgGfuGfgAf(invdT) | 902 | 243 |
| AM01227-SS | AfuUfcGfcCfcUfuGfgUfgUfuAfuAf(invdT) | 903 | 244 |
| AM01228-SS | UfaUfaCfcAfuGfgAfuCfcCfaGfuAf(invdT) | 904 | 245 |
| AM01229-SS | AfuAfcCfaUfgGfaUfcCfcAfgUfgAf(invdT) | 905 | 246 |
| AM01230-SS | CfaCfaAfcUfcCfcAfcGfgUfgGfuAf(invdT) | 906 | 247 |
| AM01231-SS | AfaGfaAfcAfuGfuCfaGfuCfuUfgAf(invdT) | 907 | 248 |
| AM01232-SS | AfgUfgUfcCfuCfaCfaAfcUfcCfcAf(invdT) | 908 | 249 |
| AM01233-SS | AfaCfaAfgCfaCfcAfcCfuGfaGfaAf(invdT) | 909 | 250 |
| AM01234-SS | CfcUfgAfgAfaAfaGfcCfcUfgUfgAf(invdT) | 910 | 251 |
| AM01235-SS | UfgAfuAfcCfaCfaCfuGfgCfaUfcAf(invdT) | 911 | 252 |
| AM01236-SS | GfaUfaCfcAfcAfcUfgGfcAfuCfaAf(invdT) | 912 | 253 |
| AM01237-SS | GfaAfaCfaGfaAfuCfaGfgUfgUfcAf(invdT) | 913 | 254 |
| AM01238-SS | AfaAfcAfgAfaUfcAfgGfuGfuCfcAf(invdT) | 914 | 255 |
| AM01239-SS | CfaGfaAfuCfaGfgUfgUfcCfuAfgAf(invdT) | 915 | 256 |
| AM01795-SS | CfcUfgUfgGfcAfgCfcCfcUfuAfuAf(invdT) | 916 | 257 |
| AM01797-SS | UfgGfcAfgCfcCfcUfuAfuUfgUfuAf(invdT) | 917 | 258 |
| AM01799-SS | AfcAfcCfaGfcAfuAfgUfcGfgAfcAf(invdT) | 918 | 259 |
| AM01801-SS | GfgAfaUfcCfaGfaUfgCfuGfaGfaAf(invdT) | 919 | 260 |
| AM01803-SS | UfcCfaGfaUfgCfuGfaGfaUfuCfgAf(invdT) | 920 | 261 |
| AM01805-SS | AfuGfcUfgAfgAfuUfcGfcCfcUfuAf(invdT) | 921 | 262 |
| AM01807-SS | CfcAfuGfgAfuCfcCfaGfuGfuCfaAf(invdT) | 922 | 263 |
| AM01809-SS | CfuGfaAfgAfaGfcAfcCfaAfcGfgAf(invdT) | 923 | 264 |
| AM01811-SS | UfcCfaGfuGfaCfaGfaAfuCfaAfgAf(invdT) | 924 | 265 |
| AM01813-SS | CfuCfaCfaAfcUfcCfcAfcGfgUfgAf(invdT) | 925 | 266 |
| AM01815-SS | AfgAfaUfcAfgGfuGfuCfcUfaGfaAf(invdT) | 926 | 267 |
| AM01817-SS | UfcAfgGfuGfuCfcUfaGfaGfaCfuAf(invdT) | 927 | 268 |
| AM02006-SS | (Chol-TEG)uAuAfgCfcCfcUfUfAfuUfgUfuAfuAfcAf(invdT) | 928 | 269 |
| AM02010-SS | (Chol-TEG)uAuGfcCfcCfuUfAfUfuGfuUfaUfaCfgAf(invdT) | 929 | 270 |
| AM02014-SS | (Chol-TEG)uAuGfaCfaCfaAfUfGfcUfcAfgAfcGfcAf(invdT) | 930 | 271 |
| AM02018-SS | (Chol-TEG)uAuAfcAfcAfaUfGfCfuCfaGfaCfgCfaAf(invdT) | 931 | 272 |
| AM02022-SS | (Chol-TEG)uAuUfuAfuCfgAfGfGfcUfcAfuUfcUfcAf(invdT) | 932 | 273 |
| AM02026-SS | (Chol-TEG)uAuGfaAfaCfaGfAfAfuCfaGfgUfgUfcAf(invdT) | 933 | 274 |
| AM02030-SS | (Chol-TEG)uAuAfcAfcCfaGfCfAfuAfgUfcGfgAfcAf(invdT) | 934 | 275 |
| AM02034-SS | (Chol-TEG)uAuUfcCfaGfaUfGfCfuGfaGfaUfuCfgAf(invdT) | 935 | 276 |
| AM02038-SS | (Chol-TEG)uAuAfuGfcUfgAfgAfuUfcGfcCfcUfuAf(invdT) | 936 | 277 |
| AM02042-SS | (Chol-TEG)uAuCfcAfuGfgAfUfCfcCfaGfuGfuCfaAf(invdT) | 937 | 278 |
| AM02211-SS | UfgUfgGfcAfGfCfcCfcUfuAfuUfgAf(invdT) | 938 | 279 |
| AM02212-SS | CfaCfaAfuGfCfUfcAfgAfcGfcAfgAf(invdT) | 939 | 280 |
| AM02213-SS | CfcGfaAfaUfCfCfaGfaUfcCfuGfuAf(invdT) | 940 | 281 |
| AM02214-SS | GfaCfuGfaGfGfAfaAfcCfcCfcGfgAf(invdT) | 941 | 282 |
| AM02215-SS | CfuAfcUfaCfCfAfuUfaUfgGfaCfaAf(invdT) | 942 | 283 |
| AM02216-SS | AfcUfaCfcAfUfUfaUfgGfaCfaGfaAf(invdT) | 943 | 284 |
| AM02217-SS | UfaCfcAfuUfAfUfgGfaCfaGfaGfuAf(invdT) | 944 | 285 |
| AM02218-SS | AfcCfaUfuAfUfGfgAfcAfgAfgUfuAf(invdT) | 945 | 286 |
| AM02219-SS | AfgAfuGfcUfGfAfgAfuUfcGfcCfcAf(invdT) | 946 | 287 |
| AM02220-SS | GfaUfgCfuGfAfGfaUfuCfgCfcCfuAf(invdT) | 947 | 288 |
| AM02221-SS | AfgAfuUfcGfCfCfcUfuGfgUfgUfuAf(invdT) | 948 | 289 |
| AM02222-SS | GfaCfaGfaAfUfCfaAfgUfgUfcCfuAf(invdT) | 949 | 290 |
| AM02223-SS | AfcAfuGfuCfAfGfuCfuUfgGfuCfcAf(invdT) | 950 | 291 |
| AM02224-SS | CfcAfaAfuGfGfUfgGfcCfuGfaCfcAf(invdT) | 951 | 292 |
| AM02225-SS | UfgGfuGfuUfAfUfaCfcAfuGfgAfuAf(invdT) | 952 | 293 |
| AM02226-SS | UfgUfuAfuAfCfCfaUfgGfaUfcCfcAf(invdT) | 953 | 294 |
| AM02227-SS | AfaCfcUfgAfCfAfcAfaUfgUfcCfaAf(invdT) | 954 | 295 |
| AM02228-SS | AfaUfgUfcCfAfGfuGfaCfaGfaAfuAf(invdT) | 955 | 296 |
| AM02229-SS | UfgUfuUfcUfGfAfaCfaAfgCfaCfcAf(invdT) | 956 | 297 |
| AM02230-SS | UfaUfcGfaGfGfCfuCfaUfuCfuCfcAf(invdT) | 957 | 298 |
| AM02231-SS | UfcGfaGfgCfUfCfaUfuCfuCfcAfcAf(invdT) | 958 | 299 |
| AM02232-SS | UfcCfuCfaCfAfAfcUfcCfcAfcGfgAf(invdT) | 959 | 300 |
| AM02233-SS | CfaAfcUfcCfCfAfcGfgUfgGfuCfcAf(invdT) | 960 | 301 |
| AM02234-SS | GfcUfcCfuUfCfUfgAfaCfaAfgCfaAf(invdT) | 961 | 302 |
| AM02235-SS | AfuAfcCfaCfAfCfuGfgCfaUfcAfgAf(invdT) | 962 | 303 |
| AM02236-SS | AfcAfgAfaUfCfAfgGfuGfuCfcUfaAf(invdT) | 963 | 304 |
| AM02237-SS | GfaAfuCfaGfGfUfgUfcCfuAfgAfgAf(invdT) | 964 | 305 |
| AM02238-SS | AfaUfcAfgGfUfGfuCfcUfaGfaGfaAf(invdT) | 965 | 306 |
| AM02239-SS | AfuCfaGfgUfGfUfcCfuAfgAfgAfcAf(invdT) | 966 | 307 |
| AM02441-SS | uAuAusAfsgUfuAfuCfgAfgGfcUfcAfuUfcUfcAf(C6-SS-Alk-Me) | 967 | 308 |
| AM02442-SS | uAuAusAfsgUfuAfuCfgaGfGfcUfcAfuUfcUfcAf(C6-SS-Alk-Me) | 968 | 308 |
| AM02443-SS | uAuAusAfsgUfuAfuCfGfaGfGfcUfcAfuUfcUfcAf(C6-SS-Alk-Me) | 969 | 308 |
| AM02444-SS | uAuAusasGfuUfaUfcGfaGfGfcUfcAfuUfcUfcAf(C6-SS-Alk-Me) | 970 | 308 |
| AM02445-SS | uAuAusCfsaGfaAfaCfaGfaAfuCfaGfgUfgUfcAf(C6-SS-Alk-Me) | 971 | 309 |
| AM02446-SS | uAuAusCfsaGfaAfaCfagAfAfuCfaGfgUfgUfcAf(C6-SS-Alk-Me) | 972 | 309 |
| AM02447-SS | uAuAusCfsaGfaAfaCfAfgAfAfuCfaGfgUfgUfcAf(C6-SS-Alk-Me) | 973 | 309 |
| AM02448-SS | uAuAuscsAfgAfaAfcAfgAfAfuCfaGfgUfgUfcAf(C6-SS-Alk-Me) | 974 | 309 |
| AM02537-SS | uAuAusCfsaGfcCfcCfuUfAfUfuGfuUfaUfaCfgAf(C11-PEG3-NAG3) | 975 | 310 |
| AM02538-SS | uAuAusCfsuGfaCfaCfaAfUfGfcUfcAfgAfcGfcAf(C11-PEG3-NAG3) | 976 | 311 |
| AM02539-SS | uAuAusUfsgAfcAfcAfaUfGfCfuCfaGfaCfgCfaAf(C11-PEG3-NAG3) | 977 | 312 |
| AM02540-SS | uAuAusAfsgUfuAfuCfgAfGfGfcUfcAfuUfcUfcAf(C11-PEG3-NAG3) | 978 | 308 |
| AM02541-SS | uAuAusCfsaGfaAfaCfaGfAfAfuCfaGfgUfgUfcAf(C11-PEG3-NAG3) | 979 | 309 |
| AM02542-SS | uAuAusAfsgAfuGfcUfgAfGfAfuUfcGfcCfcUfuAf(C11-PEG3-NAG3) | 980 | 313 |
| AM02793-SS | gsCfsaGfcCfcCfuUfaUfuGfuUfa(invdA) | 981 | 314 |
| AM02794-SS | gsCfscCfcUfuAfuUfgUfuAfuAfc(invdA) | 982 | 315 |
| AM02795-SS | csCfscCfuUfaUfuGfuUfaUfaCfg(invdA) | 983 | 316 |
| AM02796-SS | asCfsaCfaAfuGfcUfcAfgAfcGfc(invdA) | 984 | 317 |
| AM02797-SS | csAfscAfaUfgCfuCfaGfaCfgCfa(invdA) | 985 | 318 |
| AM02798-SS | csCfsgAfaAfuCfcAfgAfuCfcUfg(invdA) | 986 | 319 |
| AM02799-SS | csAfscGfaUfgCfuCfaGfaUfgCfa(invdA) | 987 | 320 |
| AM02800-SS | csCfsaCfaCfcAfgCfaUfaGfuCfg(invdA) | 988 | 321 |
| AM02801-SS | usAfsgUfcGfgAfcCfcCfaGfaAfa(invdA) | 989 | 322 |
| AM02802-SS | csAfsgAfuGfcUfgAfgAfuUfcGfc(invdA) | 990 | 323 |
| AM02803-SS | asAfsuCfaAfgUfgUfcCfuUfgCfa(invdA) | 991 | 324 |
| AM02804-SS | asGfsuUfaUfcGfaGfgCfuCfaUfu(invdA) | 992 | 325 |
| AM02805-SS | gsUfsuAfuCfgAfgGfcUfcAfuUfc(invdA) | 993 | 326 |
| AM02806-SS | csAfsaCfcUfgAfcAfcAfaUfgUfc(invdA) | 994 | 327 |
| AM02807-SS | usAfsuCfgAfgGfcUfcAfuUfcUfc(invdA) | 995 | 328 |
| AM02808-SS | gsAfsaUfaCfuAfcCfcAfaAfuGfg(invdA) | 996 | 329 |
| AM02809-SS | asUfsaCfuAfcCfcAfaAfuGfgUfg(invdA) | 997 | 330 |
| AM02810-SS | asAfsaCfaGfaAfuCfaGfgUfgUfc(invdA) | 998 | 331 |
| AM02811-SS | asAfscAfgAfaUfcAfgGfuGfuCfc(invdA) | 999 | 332 |
| AM02812-SS | CfsasGfcCfcCfuUfaUfuGfuUfa(invdA) | 1000 | 333 |
| AM02813-SS | CfscsCfcUfuAfuUfgUfuAfuAfc(invdA) | 1001 | 334 |
| AM02814-SS | CfscsCfuUfaUfuGfuUfaUfaCfg(invdA) | 1002 | 335 |
| AM02815-SS | CfsasCfaAfuGfcUfcAfgAfcGfc(invdA) | 1003 | 336 |
| AM02816-SS | AfscsAfaUfgCfuCfaGfaCfgCfa(invdA) | 1004 | 337 |
| AM02817-SS | CfsgsAfaAfuCfcAfgAfuCfcUfg(invdA) | 1005 | 338 |
| AM02818-SS | AfscsGfaUfgCfuCfaGfaUfgCfa(invdA) | 1006 | 339 |
| AM02819-SS | CfsasCfaCfcAfgCfaUfaGfuCfg(invdA) | 1007 | 340 |
| AM02820-SS | AfsgsUfcGfgAfcCfcCfaGfaAfa(invdA) | 1008 | 341 |
| AM02821-SS | AfsgsAfuGfcUfgAfgAfuUfcGfc(invdA) | 1009 | 342 |
| AM02822-SS | AfsusCfaAfgUfgUfcCfuUfgCfa(invdA) | 1010 | 343 |
| AM02823-SS | GfsusUfaUfcGfaGfgCfuCfaUfu(invdA) | 1011 | 344 |
| AM02824-SS | UfsusAfuCfgAfgGfcUfcAfuUfc(invdA) | 1012 | 345 |
| AM02825-SS | AfsasCfcUfgAfcAfcAfaUfgUfc(invdA) | 1013 | 346 |
| AM02826-SS | AfsusCfgAfgGfcUfcAfuUfcUfc(invdA) | 1014 | 347 |
| AM02827-SS | AfsasUfaCfuAfcCfcAfaAfuGfg(invdA) | 1015 | 348 |
| AM02828-SS | UfsasCfuAfcCfcAfaAfuGfgUfg(invdA) | 1016 | 349 |
| AM02829-SS | AfsasCfaGfaAfuCfaGfgUfgUfc(invdA) | 1017 | 350 |
| AM02830-SS | AfscsAfgAfaUfcAfgGfuGfuCfc(invdA) | 1018 | 351 |
| AM02861-SS | uAuAusAfsgUfuauCfgAfGfGfcUfcAfuUfcUfcAf(C11-PEG3-NAG3) | 1019 | 308 |
| AM02941-SS | uAuAusasguuaucgAfgGfcucauucuca(C11-PEG3-NAG3) | 1020 | 308 |
| AM02942-SS | uAuAusasguuaucgaGfGfcucauucuca(C11-PEG3-NAG3) | 1021 | 308 |
| AM02946-SS | uAuAuscsagaaaCfagAfAfuCfagguguca(C11-PEG3-NAG3) | 1022 | 309 |
| AM02947-SS | uAuAuscsagaaaCfaGfaAfuCfagguguca(C11-PEG3-NAG3) | 1023 | 309 |
| AM02948-SS | uAuAuscsagaaacaGfaAfucagguguca(C11-PEG3-NAG3) | 1024 | 309 |
| AM02949-SS | uAuAuscsagaaacagAfAfucagguguca(C11-PEG3-NAG3) | 1025 | 309 |
| AM03030-SS | (Stearyl)uAuAusCfsaGfaAfaCfaGfAfAfuCfaGfgUfgUfcAf(C11-PEG3-NAG3) | 1026 | 309 |
| AM03036-SS | uAuAusCfsagaAfaCfaGfAfAfuCfaGfgUfgUfcAf(C11-PEG3-NAG3) | 1027 | 309 |
| AM03037-SS | uAuAusCfsagaaaCfaGfAfAfuCfaGfgUfgUfcAf(C11-PEG3-NAG3) | 1028 | 309 |
| AM03038-SS | uAuAusCfsagaaaCfagaAfuCfaggUfgUfcAf(C11-PEG3-NAG3) | 1029 | 309 |
| AM03039-SS | uAuAusCfsaGfaAfaCfaGfAfAfuCfagGfuGfucAf(C11-PEG3-NAG3) | 1030 | 309 |
| AM03042-SS | uAuAusCfsaGfaAfaCfaGfAfAfucagguguca(C11-PEG3-NAG3) | 1031 | 309 |
| AM03060-SS | uAuAusCfsaGfaAfaCfaGfAfAfuCfaggugUfca(C11-PEG3-NAG3) | 1032 | 309 |
| AM03061-SS | uAuAusCfsaGfaAfaCfaGfAfAfuCfagguguca(C11-PEG3-NAG3) | 1033 | 309 |
| AM03062-SS | uAuAusCfsagaaaCfaGfAfAfuCfaggugUfca(C11-PEG3-NAG3) | 1034 | 309 |
| AM03064-SS | uAuAusCfsaGfaAfaCfaGfaAfuCfaGfgugucAf(C11-PEG3-NAG3) | 1035 | 309 |
| AM03122-SS | uAuAusAfsgUfuAfuCfgAfGfGfcUfcAfuUfcUfCMAM(C11-PEG3-NAG3) | 1036 | 308 |
| AM03123-SS | uAuAUuNAAfsgsUfuAfuCfgAfGfGfcUfcAfuUfcUfcAf(C11-PEG3-NAG3) | 1037 | 308 |
| AM03124-SS | uAuAuAfsgsUfuAfuCfgAfGfGfcUfcAfuUfcUfcAf(C11-PEG3-NAG3) | 1038 | 308 |
| AM03125-SS | uAuAusCfsaGfcCfcCfuUfAfUfuGfuUfaUfaCfga(C11-PEG3-NAG3) | 1039 | 310 |
| AM03126-SS | uAuAuscsaGfcCfcCfuUfAfUfuGfuUfaUfaCfgAf(C11-PEG3-NAG3) | 1040 | 310 |
| AM03128-SS | uAuAuscsaGfcCfcCfuUfAfUfuGfuUfaUfaCfga(C11-PEG3-NAG3) | 1041 | 310 |
| AM03144-SS | uAuAusAfsgUfuAfuCfgAfGfGfcUfcAfuUfcUfcAf(C6-PEG4-NAG3) | 1042 | 308 |
| AM03220-SS | uAuAusAfsgUfuAfuCfgAfGfGfcUfcauucuca | 1043 | 308 |
| 1532-SS01 | | | |
| AM03221-SS | uAuAusAfsgUfuAfuCfgAfGfGfcucauucuca | 1044 | 308 |
| AM03222-SS | uAuAusAfsguuauCfgAfGfGfcUfcauucuca | 1045 | 308 |
| AM03223-SS | uAuAusAfsguuauCfgAfGfGfcucauucuca | 1046 | 308 |
| AM03224-SS | uAuAusasguuauCfgAfGfGfcucauucuca | 1047 | 308 |
| AM03225-SS | uAuAusasguuaucgAfGfGfcucauucuca | 1048 | 308 |
| AM03226-SS | uAuAusAfsgUfuAfuCfgAfGfdGcUfcauucuca | 1049 | 308 |
| AM03227-SS | uAuAusAfsgUfuAfuCfgAfGfdGcucauucuca | 1050 | 308 |
| AM03228-SS | uAuAusAfsguuauCfgAfGfdGcUfcauucuca | 1051 | 308 |
| AM03229-SS | uAuAusAfsguuauCfgAfGfdGcucauucuca | 1052 | 308 |
| AM03230-SS | uAuAusasguuauCfgAfGfdGcucauucuca | 1053 | 308 |
| AM03231-SS | uAuAusasguuaucgAfGfdGcucauucuca | 1054 | 308 |
| AM03232-SS | uAuAusAfsgUfuAfuCfgaGfGfcUfcauucuca | 1055 | 308 |
| AM03233-SS | uAuAusAfsgUfuAfuCfgaGfGfcucauucuca | 1056 | 308 |
| AM03234-SS | uAuAusAfsguuauCfgaGfGfcUfcauucuca | 1057 | 308 |
| AM03235-SS | uAuAusAfsguuauCfgaGfGfcucauucuca | 1058 | 308 |
| AM03236-SS | uAuAusasguuauCfgaGfGfcucauucuca | 1059 | 308 |
| AM03237-SS | uAuAusasguuaucgaGfGfcucauucuca | 1060 | 308 |
| AM03238-SS | uAuAusAfsgUfuAfuCfgAfGfGfcUfcauucuca(C11-PEG3-NAG3) | 1061 | 308 |
| AM03240-SS | uAuAusAfsguuauCfgAfGfGfcUfcauucuca(C11-PEG3-NAG3) | 1062 | 308 |
| AM03330-SS | uAuAusAfsgUfuAfuCfgAfGfGfcUfcAfuUfcUfcAf | 1063 | 308 |
| 1532-SS00 | | | |
| AM03291-SS | uAuAusCfsaGfcCfcCfuUfAf UfuGfuUfaUfaCfgAf | 1064 | 310 |
| AM03292-SS | uAuAusCfsagcCfcCfuUfaUfuguUfaUfaCfga | 1065 | 310 |
| AM03293-SS | uAuAusCfsagcCfcCfuUfaUfuguuauaCfga | 1066 | 310 |
| AM03294-SS | uAuAuscsagccccuUfaUfuguuauacga | 1067 | 310 |
| AM03295-SS | uAuAuscsagccccuuAfUfuguuauacga | 1068 | 310 |
| AM03296-SS | uAuAusCfsagcCfcCfuUfAfUfuguUfaUfaCfga | 1069 | 310 |
| AM03297-SS | uAuAusCfsagcCfcCfuUfAfUfuguuauaCfga | 1070 | 310 |
| AM03298-SS | uAuAuscsagccccuUfAfUfuguuauacga | 1071 | 310 |
| AM03299-SS | uAuAusCfsagcCfcCfuuAfUfuguuauaCfga | 1072 | 310 |
| AM03277-SS | uAuAuscsagccccuUfaUfuguuauacga(C11-PEG3-NAG3) | 1073 | 310 |
| AM03275-SS | uAuAusCfsagcCfcCfuUfaUfuguUfaUfaCfga(C11-PEG3-NAG3) | 1074 | 310 |
| AM03276-SS | uAuAusCfsagcCfcCfuUfaUfuguuauaCfga(C11-PEG3-NAG3) | 1075 | 310 |
| AM03278-SS | uAuAuscsagccccuuAfUfuguuauacga(C11-PEG3-NAG3) | 1076 | 310 |
| AM03287-SS | uAuAusCfsagcCfcCfuUfAfUfuguUfaUfaCfga(C11-PEG3-NAG3) | 1077 | 310 |
| AM03288-SS | uAuAusCfsagcCfcCfuUfAfUfuguuauaCfga(C11-PEG3-NAG3) | 1078 | 310 |
| AM03289-SS | uAuAuscsagccccuUfAfUfuguuauacga(C11-PEG3-NAG3) | 1079 | 310 |
| AM03290-SS | uAuAusCfsagcCfcCfuuAfUfuguuauaCfga(C11-PEG3-NAG3) | 1080 | 310 |
| AM03243-SS | uAuAusasguuaucgAfGfGfcucauucuca(C11-PEG3-NAG3) | 1081 | 308 |
| AM03424-SS | (Chol-TEG)uAuAusasguuaucgaGfGfcucauucuc(invdA) | 1082 | 308 |
| AM03425-SS | (Chol-TEG)uAuAusasguuaucgaGfGfcucauucuca | 1083 | 308 |
| AM03426-SS | (Chol-TEG)uAuAusAfgUfuAfuCfgAfGfGfcUfcAfuUfcUfc(invdA) | 1084 | 308 |
| AM03457-SS | CfscsCfcUfuAfuUfgUfuAfuAfca(NAG13) | 1085 | 334 |
| AM03458-SS | CfscsCfuUfaUfuGfuUfaUfaCfga(NAG13) | 1086 | 335 |
| AM03459-SS | AfsgsAfuGfcUfgAfgAfuUfcGfca(NAG13) | 1087 | 342 |
| AM03460-SS | GfsusUfaUfcGfaGfgCfuCfaUfua(NAG13) | 1088 | 344 |
| AM03461-SS | AfsusCfgAfgGfcUfcAfuUfcUfca(NAG13) | 1089 | 347 |
| AM03462-SS | AfsasCfaGfaAfuCfaGfgUfgUfca(NAG13) | 1090 | 350 |
| AM03489-SS | uAuAusasguuaucgaGfGfcucauucuca(NAG13) | 1091 | 308 |
| AM03492-SS | uAuAusCfsaGfcCfcCfuUfAfUfuGfuUfaUfaCfga(NAG13) | 1092 | 310 |
| AM03544-SS | uAuAuscsagcccCfuUfaUfuguuauacga(NAG13) | 1093 | 310 |
| AM03545-SS | uAuAuscsagccccuuAfUfuGfuuauacga(NAG13) | 1094 | 310 |
| AM03546-SS | uAuAuscsagccccuUfAfUfuguuauacga(NAG13) | 1095 | 310 |
| AM03547-SS | uAuAusAfsgUfuAfuCfgAfGfGfcUfcAfuUfcUfcAf(NAG13) | 1096 | 308 |
| AM03650-SS | uAuAusasguuaucgAfGfGfcucauucuca(NAG13) | 1097 | 308 |
| AM03651-SS | uAuAuscsaGfcCfcCfuUfAfUfuGfuUfaUfaCfga(NAG13) | 1098 | 310 |
| AM03670-SS | uAuAuscsagcgccuUfAfUfuguuauacga(NAG13) | 1099 | 352 |
| AM03683-SS | uAuAuscsaGfcCfcCfuUfAfUfuGfuUfaUfaCfga | 1100 | 310 |
| AM03741-SS | cscsccUfUfAfuuguuauaca(NAG13) | 1101 | 334 |
| AM03742-SS | cscsccUfUfAfuuguuauaCMAM(NAG13) | 1102 | 334 |
| AM03743-SS | CMsCMsccUfUfAfuuguuauaCMAM(NAG13) | 1103 | 334 |
| AM03746-SS | cscscuUfAfUfuguuauacga(NAG13) | 1104 | 335 |
| AM03747-SS | cscscuUfAfUfuguuauacGMAM(NAG13) | 1105 | 335 |
| AM03748-SS | CMsCMscuUfAfUfuguuauacGMAM(NAG13) | 1106 | 335 |
| AM03751-SS | asuscgAfGfGfcucauucuca(NAG13) | 1107 | 347 |
| AM03752-SS | asuscgAfGfGfcucauucuCMAM(NAG13) | 1108 | 347 |
| AM03753-SS | AMsTMscgAfGfGfcucauucuCMAM(NAG13) | 1109 | 353 |
| AM03757-SS | asascaGfAfAfucagguguca(NAG13) | 1110 | 350 |
| AM03758-SS | asascaGfAfAfucagguguCMAM(NAG13) | 1111 | 350 |
| AM03759-SS | AMsAMscaGfAfAfucagguguCMAM(NAG13) | 1112 | 350 |
| AM03859-SS | (NAG18)uauausasguuaucgAfGfGfcucauucuc(invdA) | 1113 | 308 |
| AM03861-SS | (NAG18)uauauscsaGfcCfcCfuUfAfUfuGfuUfaUfaCfg(invdA) | 1114 | 310 |
| AM03879-SS | (NAG4)uscaGfcCfcCfuUfAfUfuGfuUfaUfaCfgausu(invAb) | 1115 | 354 |
| AM03880-SS | (NAG4)uscaGfcCfcCfuUfAfUfuGfuUfaUfaCfgsa(invAb) | 1116 | 355 |
| AM03881-SS | (NAG24)uscaGfcCfcCfuUfAfUfuGfuUfaUfaCfgausu(invAb) | 1117 | 354 |
| AM03882-SS | (NAG4)usaguuaucgAfGfGfcucauucucausu(invAb) | 1118 | 356 |
| AM03928-SS | uAuAuscsagcccCfuUfAfUfuguuauacga(NAG13) | 1119 | 310 |
| AM03931-SS | uAuAusasguuauCfgAfGfGfcucauucuca(NAG13) | 1120 | 308 |
| AM03968-SS | (NAG4)uauauscaGfcCfcCfuUfAfUfuGfuUfaUfaCfgs(invdA) | 1121 | 310 |
| AM03970-SS | (NAG4)(invAb)GfcCfcCfuUfAfUfuGfuUfaUfaCfgausu(invAb) | 1122 | 357 |
| AM04138-SS | (NAG25)uauausasguuaucgAfGfGfcucauucuc(invdA) | 1123 | 308 |
| AM04152-SS | (Alk-PEG5-C6)uauausasguuaucgAfGfGfcucauucuCM(invdA) | 1124 | 308 |
| AM04214-SS | (Alk-SMPT-C6)uauausasguuaucgAfGfGfcucauucuCM(invdA) | 1125 | 308 |
| AM04233-SS | (NAG26)uauausasguuaucgAfGfGfcucauucuCM(invdA) | 1126 | 308 |
| AM04372-SS | (NAG27)uauausasguuaucgAfGfGfcucauucuCM(invdA) | 1127 | 308 |
| AM04381-SS | (NAG25)auauscsagccccuUfAfUfuguuauacga(invdT) | 1128 | 358 |
| AM04382-SS | (NAG25)uauscsagccccuUfAfUfuguuauacgau(invdT) | 1129 | 359 |
| AM04391-SS | (NAG25)auausasguuaucgAfGfGfcucauucuca(invdT) | 1130 | 360 |
| AM04392-SS | (NAG25)uausasguuaucgAfGfGfcucauucucau(invdT) | 1131 | 361 |
| AM04412-SS | (NAG25)uauauscsagccccuUfAfUfuguuauacg(invdA) | 1132 | 310 |
| AM04414-SS | (NAG25)(invAb)gccccuUfAfUfuguuauacgauus(invAb) | 1133 | 357 |
| AM04416-SS | (NAG25)(invAb)uuaucgAfGfGfcucauucucausu(invAb) | 1134 | 362 |
| AM04496-SS | (NAG25)(invAb)GfcCfcCfuUfAfUfuGfuUfaUfaCfgausu(invAb) | 1135 | 357 |
| AM04497-SS | (NAG29)uauausasguuaucgAfGfGfcucauucuc(invdA) | 1136 | 308 |
| AM04499-SS | (NAG28)(invAb)GfcCfcCfuUfAfUfuGfuUfaUfaCfgausu(invAb) | 1137 | 357 |
| AM04498-SS | (NAG29)uauauaasuuaucgaGfGfcucauucucsa(invAb) | 1138 | 363 |
| AM04500-SS | (NAG30)(invAb)GfcCfcCfuUfAfUfuGfuUfaUfaCfgausu(invAb) | 1139 | 357 |
| AM04502-SS | (NAG25)uauauaasuuaucgaGfGfcucauucucsa(invAb) | 1140 | 363 |
| AM04535-SS | (NAG25)uauaucsasgccccuUfAfUfuguuauacg(invdA) | 1141 | 310 |
| AM04536-SS | (NAG25)uauaucasgccccuUfAfUfuguuauacg(invdA) | 1142 | 310 |
| AM04537-SS | (NAG25)uauauasgsuuaucgAfGfGfcucauucuc(invdA) | 1143 | 308 |
| AM04538-SS | (NAG25)uauauagsuuaucgAfGfGfcucauucuc(invdA) | 1144 | 308 |
| AM04543-SS | (NAG30)uscaGfcCfcCfuUfAfUfuGfuUfaUfaCfgsa(invAb) | 1145 | 355 |
| AM04578-SS | (NAG25)ggcsagccccuUfAfUfuguuauacgAMs(invdT)dT | 1146 | 364 |
| AM04588-SS | (NAG25)ggcsagccccuUfAfUfuguuauacgAMsuu(invdT) | 1147 | 365 |
| AM04579-SS | (NAG25)GuNAgcsagccccuUfAfUfuguuauacgAMs(invdT)dT | 1148 | 364 |
| AM04580-SS | (NAG25)ggcs(invdA)gccccuUfAfUfuguuauacgAMs(invdT)dT | 1149 | 364 |
| AM04581-SS | (NAG25)csagccccuUfAfUfuguuauacgAMs(invdT)dTdTdT | 1150 | 366 |
| AM04611-SS | (NAG31)(invAb)GfcCfcCfuUfAfUfuGfuUfaUfaCfgausu(invAb) | 1151 | 357 |
| AM04612-SS | (NAG32)(invAb)GfcCfcCfuUfAfUfuGfuUfaUfaCfgausu(invAb) | 1152 | 357 |
| AM04669-SS | (NAG25)uauauagsusuaucgAfGfGfcucauucuc(invdA) | 1153 | 308 |
| AM04670-SS | (NAG25)uauauagususaucgAfGfGfcucauucuc(invdA) | 1154 | 308 |
| AM04671-SS | (NAG25)gcgausasguuaucgAfGfGfcucauucuc(invdA) | 1155 | 367 |
| AM04672-SS | (NAG25)ugaausasguuaucgAfGfGfcucauucuc(invdA) | 1156 | 368 |
| AM04673-SS | (NAG25)aucgusasguuaucgAfGfGfcucauucuc(invdA) | 1157 | 369 |
| AM04674-SS | (NAG25)u(invdA)uausasguuaucgAfGfGfcucauucuc(invdA) | 1158 | 308 |
| AM04675-SS | (NAG25)uaua(invdA)sasguuaucgAfGfGfcucauucuc(invdA) | 1159 | 370 |
| AM04676-SS | (NAG25)uauaus(invdA)sguuaucgAfGfGfcucauucuc(invdA) | 1160 | 308 |
| AM04726-SS | (NAG30)aGfcCfcCfuUfAfUfuGfuUfaUfaCfgsa(invAb) | 1161 | 371 |
| AM04727-SS | (NAG30)aaGfcCfcCfuUfAfUfuGfuUfaUfaCfgsa(invAb) | 1162 | 372 |
| AM04728-SS | (NAG30)sasGfcCfcCfuUfAfUfuGfuUfaUfaCfgas(invAb) | 1163 | 371 |
| AM04729-SS | (NAG30)gscaGfcCfcCfuUfAfUfuGfuUfaUfaCfgsa(invAb) | 1164 | 373 |
| AM04737-SS | (NAG25)uauauagsuuaucgaGfGfcucauucucsa(invAb) | 1165 | 374 |
| AM04741-SS | (NAG30)sgscaGfcCfcCfuUfAfUfuGfuUfaUfaCfgsa(invAb) | 1166 | 373 |
| AM04742-SS | (NAG33)(invAb)GfcCfcCfuUfAfUfuGfuUfaUfaCfgausu(invAb) | 1167 | 357 |
| AM04743-SS | (NAG34)(invAb)GfcCfcCfuUfAfUfuGfuUfaUfaCfgausu(invAb) | 1168 | 357 |
| AM04744-SS | (NAG35)(invAb)GfcCfcCfuUfAfUfuGfuUfaUfaCfgausu(invAb) | 1169 | 357 |
| AM04803-SS | (NAG30)acGfcCfcCfuUfAfUfuGfuUfaUfaCfgsa(invAb) | 1170 | 375 |
| AM04804-SS | (NAG30)sasaGfcCfcCfuUfAfUfuGfuUfaUfaCfgas(invAb) | 1171 | 372 |
| AM04807-SS | (NAG30)sascGfcCfcCfuUfAfUfuGfuUfaUfaCfgas(invAb) | 1172 | 375 |
| AM04806-SS | (NAG30)sgscaGfcCfcCfuUfAfUfuGfuUfaUfaCfgas(invAb) | 1173 | 373 |
| AM04808-SS | (NAG31)sGfcCfcCfuUfAfUfuGfuUfaUfaCfgausu(invAb) | 1174 | 376 |
| AM04809-SS | (NAG31)saGfcCfcCfuUfAfUfuGfuUfaUfaCfgausu(invAb) | 1175 | 377 |
| AM04810-SS | (NAG31)sasaGfcCfcCfuUfAfUfuGfuUfaUfaCfgas(invAb) | 1176 | 372 |
| AM04811-SS | (NAG31)sasaGfcCfcCfuUfAfUfuGfuUfaUfaCfgausu(invAb) | 1177 | 378 |
| AM04812-SS | (NAG31)sasaGfcCfcCfuUfAfUfuGfuUfaUfaCfg(invdA)usu(invAb) | 1178 | 378 |
| AM04813-SS | (NAG31)uauausasguuaucgAfGfGfcucauucuc(invdA) | 1179 | 308 |
| AM04816-SS | (NAG31)uauscsagccccuUfAfUfuguuauacgs(invdA) | 1180 | 379 |
| AM04817-SS | (NAG31)uagscsagccccuUfAfUfuguuauacgs(invdA) | 1181 | 380 |
| AM04835-SS | (NAG31)uaucagccccuUfAfUfuguuauacgs(invdA) | 1182 | 379 |
| AM04819-SS | (NAG31)sgscagccccuUfAfUfuguuauacgs(invdA) | 1183 | 381 |
| AM04820-SS | (NAG31)sgscagccccuUfAfUfuguuauacgsa(invAb) | 1184 | 373 |
| AM04862-SS | (NAG25)auaagasguuaucgAfGfGfcucauucuc(invdA) | 1185 | 382 |
| AM04863-SS | (NAG25)auaagsasguuaucgAfGfGfcucauucuc(invdA) | 1186 | 382 |
| AM04864-SS | (NAG25)auaggcsagccccuUfAfUfuguuauacg(invdA) | 1187 | 383 |
| AM04865-SS | (NAG25)auaggscsagccccuUfAfUfuguuauacg(invdA) | 1188 | 383 |
| AM04866-SS | (NAG25)scsagccccuUfAfUfuguuauacgs(invdA) | 1189 | 384 |
| AM04867-SS | (NAG31)scsagccccuUfAfUfuguuauacgs(invdA) | 1190 | 384 |
| AM04868-SS | (NAG25)sgsccccuUfAfUfuguuauacgauus(invAb) | 1191 | 376 |
| AM04869-SS | (NAG31)sgsccccuUfAfUfuguuauacgauus(invAb) | 1192 | 376 |
| AM04870-SS | (NAG25)sGfsccccuUfAfUfuguuauacgauus(invAb) | 1193 | 376 |
| AM04978-SS | (NAG31)sGfscCfcCfuUfAfUfuGfuUfaUfaCfgauus(invAb) | 1194 | 376 |
| AM05070-SS | (NAG25)uauauscsagcccc(NOTA-dT)UfAfUfuguuauacg(invdA) | 1195 | 385 |
| AM05072-SS | (NAG25)(invAb)GfcCfcCf(NOTA-dT)UfAfUfuGfuUfaUfaCfgausu(invAb) | 1196 | 1241 |
| 1532-SS02 | uAuAusAfsgUfuAfuCfgAfGfGfcucAfuucuca | 1197 | 308 |
| 1532-SS03 | uAuAusAfsgUfuAfuCfgAfGfGfcucauUfcuca | 1198 | 308 |
| 1532-SS04 | uAuAusAfsgUfuAfuCfgAfGfGfcucauucUfca | 1199 | 308 |
| 1532-SS05 | uAuAusAfsgUfuAfuCfgAfGfGfcucauucucAf | 1200 | 308 |
| 1532-SS06 | uAuAusAfsgUfuAfuCfgAfgGfcUfcauucucAf | 1201 | 308 |
| 1532-SS07 | uAuAusAfsgUfuAfuCfgAfgGfcucAfuucucAf | 1202 | 308 |
| 1532-SS08 | uAuAusAfsgUfuAfuCfgAfgGfcucauUfcucAf | 1203 | 308 |
| 1532-SS09 | uAuAusAfsgUfuAfuCfgAfgGfcucauucUfcAf | 1204 | 308 |
| 1532-SS10 | uAuAusAfsgUfuAfuCfgAfgGfcucauucucAf | 1205 | 308 |
| 1532-SS11 | uAuAusAfsgUfuAfuCfgaGfGfcucauucucAf | 1206 | 308 |
| 1532-SS12 | uAuAusAfsgUfuAfuCfgagGfcUfcauucucAf | 1207 | 308 |
| 1532-SS13 | uAuAusAfsgUfuAfuCfgagGfcucAfuucucAf | 1208 | 308 |
| 1532-SS14 | uAuAusAfsgUfuAfuCfgagGfcucauUfcucAf | 1209 | 308 |
| 1532-SS15 | uAuAusAfsgUfuAfuCfgagGfcucauucUfcAf | 1210 | 308 |
| 1532-SS16 | uAuAusAfsgUfuAfuCfgagGfcucauUfcUfcAf | 1211 | 308 |
| 1532-SS17 | uAuAusAfsgUfuauCfgAfgGfcucauUfcUfcAf | 1212 | 308 |
| 1532-SS18 | uAuAusAfsgUfuauCfgaGfGfcucauUfcUfcAf | 1213 | 308 |
| 1532-SS19 | uAuAusAfsgUfuauCfgagGfcUfcauUfcUfcAf | 1214 | 308 |
| 1532-SS20 | uAuAusAfsgUfuauCfgagGfcucAfuUfcUfcAf | 1215 | 308 |
| 1532-SS21 | uAuAusAfsgUfuauCfgagGfcUfcAfuUfcUfcAf | 1216 | 308 |
| 1532-SS22 | uAuAusAfsguuAfuCfgagGfcUfcAfuUfcUfcAf | 1217 | 308 |
| 1532-SS23 | uAuAusAfsguuauCfgAfgGfcUfcAfuUfcUfcAf | 1218 | 308 |
| 1532-SS24 | uAuAusAfsguuauCfgaGfGfcUfcAfuUfcUfcAf | 1219 | 308 |
| 1533-CfinSS | uAuAuscsaGfaAfacaGfAfAfucaGfgUfgUfcAf | 1220 | 309 |
| 1533-SS00 | uAuAusCfsaGfaAfaCfaGfAfAfuCfaGfgUfgUfcAf | 1221 | 309 |
| 1533-SS01 | uAuAusCfsaGfaAfaCfaGfAfAfuCfaGfguguca | 1222 | 309 |
| 1533-SS02 | uAuAusCfsaGfaAfaCfaGfAfAfuCfaggugUfca | 1223 | 309 |
| 1533-SS03 | uAuAusCfsaGfaAfaCfaGfAfAfuCfaggugucAf | 1224 | 309 |
| 1533-SS04 | uAuAusCfsaGfaAfaCfaGfAfAfuCfaggUfguca | 1225 | 309 |
| 1533-SS05 | uAuAusCfsaGfaAfaCfaGfaAfuCfaGfgugucAf | 1226 | 309 |
| 1533-SS06 | uAuAusCfsaGfaAfaCfaGfaAfuCfaggugUfcAf | 1227 | 309 |
| 1533-SS07 | uAuAusCfsaGfaAfaCfaGfaAfuCfaggUfgucAf | 1228 | 309 |
| 1533-SS08 | uAuAusCfsaGfaAfaCfagAfAfuCfaggugUfcAf | 1229 | 309 |
| 1533-SS09 | uAuAusCfsaGfaAfaCfagaAfuCfaggUfgUfcAf | 1230 | 309 |
| 1533-SS10 | uAuAusCfsaGfaAfaCfagaAfuCfaGfgugUfcAf | 1231 | 309 |
| 1533-SS11 | uAuAusCfsaGfaaaCfagAfAfuCfaGfgUfgUfcAf | 1232 | 309 |
| 1533-SS20 | | | |
| 1533-SS12 | uAuAusCfsaGfaaaCfaGfaAfuCfaGfgUfgUfcAf | 1233 | 309 |
| 1533-SS13 | uAuAusCfsaGfaAfaCfagaAfuCfaGfgUfgUfcAf | 1234 | 309 |
| 1533-SS14 | uAuAusCfsaGfaaaCfagaAfuCfaGfgUfgUfcAf | 1235 | 309 |
| 1533-SS15 | uAuAusCfsagaAfaCfagaAfuCfaGfgUfgUfcAf | 1236 | 309 |
| 1533-SS16 | uAuAusCfsagaaaCfagAfAfuCfaGfgUfgUfcAf | 1237 | 309 |
| 1533-SS17 | uAuAusCfsagaaaCfaGfaAfuCfaGfgUfgUfcAf | 1238 | 309 |
| 1533-SS18 | uAuAusCfsagaaaCfaGfAfAfuCfaGfgUfgUfcAf | 1239 | 309 |
| 1533-SS19 | uAuAusCfsagaAfaCfagAfAfuCfaGfgUfgUfcAf | 1240 | 309 |
| AM05341-SS | (NAG37)(invAb)GfcCfcCfuUfAfUfuGfuUfaUfaCfgausu(invAb) | 1256 | 357 |
| AM05342-SS | (NAG37)scsagccccuUfAfUfuguuauacgs(invdA) | 1257 | 381 |
| AM05489-SS | (NAG25)uauausasguuaucgAfGfGfcucauucucas(invAb) | 1269 | 308 |
| AM05491-SS | (NAG25)(invAb)uuaucgAfGfGfcucauucucas(invAb) | 1270 | 1258 |
| AM05494-SS | (NAG25)(invAb)GfcCfcCfuUfAfUfuGfuUfaUfaCfgas(invAb) | 1271 | 1259 |
| AM05499-SS | (NAG25)(invAb)gccccuUfAfUfuguuauacgausu(invAb) | 1272 | 357 |
| AM05500-SS | (NAG25)uauauscsagccccuUfAfUfuguuauacgas(invAb) | 1273 | 310 |
| AM05501-SS | (NAG25)(invAb)gccccuUfAfUfuguuauacgas(invAb) | 1274 | 1259 |
| AM05502-SS | (NAG25)sasagccccuUfAfUfuguuauacgs(invdA) | 1275 | 1261 |
| AM05503-SS | (NAG25)scsagccccuUfAfUfuguuauacgas(invAb) | 1276 | 1260 |
| AM05504-SS | (NAG25)sgsccccuUfAfUfuguuauacgas(invAb) | 1277 | 371 |
| AM05505-SS | (NAG25)sgsccccuUfAfUfuguuauacgs(invdA) | 1278 | 371 |
| AM05506-SS | (NAG25)sasagccccuUfAfUfuguuauacgas(invAb) | 1279 | 1261 |

[0072] A sense strand containing a sequence listed in Table 2B can be hybridized to any antisense strand containing a sequence listed in Table 2A provided the two sequences have a region of at least 90% complementarity over a contiguous 16, 17, 18, 19, 20, or 21 nucleotide sequence. Representative LPA RNAi agents are represented by the Duplex ID Nos. shown in Tables 3A and 3B.

[0073] In some embodiments an LPA RNAi agent comprises of any of the Duplex ID Nos. presented herein. In some embodiments an LPA RNAi agent consists of any of the Duplex ID Nos. presented herein. In some embodiments, an LPA RNAi agent comprises the sense strand and antisense strand nucleotide sequences of any of the Duplex ID Nos. presented herein. In some embodiments, an LPA RNAi agent comprises the sense strand and antisense strand nucleotide sequences of any of the Duplex ID Nos. presented herein and a targeting group and/or linking group wherein the targeting group and/or linking group is covalently linked (i.e. conjugated) to the sense strand or the antisense strand. In some embodiments, an LPA RNAi agent comprises the sense strand and antisense strand modified nucleotide sequences of any of the Duplex ID Nos. presented herein. In some embodiments, an LPA RNAi agent comprises the sense strand and antisense strand modified nucleotide sequences of any of the Duplex ID Nos. presented herein and a targeting group and/or linking group wherein the targeting group and/or linking group is covalently linked to the sense strand or the antisense strand.

TABLE 3A
LPA RNAi agent duplexes with Duplex ID numbers.

| | Antisense | Sense Strand | | Antisense | Sense Strand | | Antisense | Sense Strand |
|---|---|---|---|---|---|---|---|---|
| Duplex ID | Strand ID | ID | Duplex ID | Strand ID | ID | Duplex ID | Strand ID | ID |
| AD00571 | AM01240-AS | AM01173-SS | AD02120 | AM03257-AS | AM03229-SS | AD02500 | AM03107-AS | AM03295-SS |
| AD00572 | AM01241-AS | AM01174-SS | AD02121 | AM03257-AS | AM03230-SS | AD02501 | AM03279-AS | AM03295-SS |
| AD00573 | AM01242-AS | AM01175-SS | AD02122 | AM03257-AS | AM03231-SS | AD02502 | AM03280-AS | AM03295-SS |
| AD00574 | AM01243-AS | AM01176-SS | AD02123 | AM03257-AS | AM03232-SS | AD02503 | AM03281-AS | AM03295-SS |
| AD00575 | AM01244-AS | AM01177-SS | AD02124 | AM03257-AS | AM03233-SS | AD02504 | AM03282-AS | AM03295-SS |
| AD00576 | AM01245-AS | AM01178-SS | AD02125 | AM03257-AS | AM03234-SS | AD02505 | AM03283-AS | AM03295-SS |
| AD00577 | AM01246-AS | AM01179-SS | AD02126 | AM03257-AS | AM03235-SS | AD02506 | AM03284-AS | AM03295-SS |
| AD00578 | AM01247-AS | AM01180-SS | AD02127 | AM03257-AS | AM03236-SS | AD02507 | AM03300-AS | AM03295-SS |
| AD00579 | AM01248-AS | AM01181-SS | AD02128 | AM03257-AS | AM03237-SS | AD02508 | AM03301-AS | AM03295-SS |
| AD00580 | AM01249-AS | AM01182-SS | AD02129 | AM03258-AS | AM03220-SS | AD02509 | AM03107-AS | AM03296-SS |
| AD00581 | AM01250-AS | AM01183-SS | AD02130 | AM03258-AS | AM03221-SS | AD02510 | AM03279-AS | AM03296-SS |
| AD00582 | AM01251-AS | AM01184-SS | AD02131 | AM03258-AS | AM03222-SS | AD02511 | AM03280-AS | AM03296-SS |
| AD00583 | AM01252-AS | AM01185-SS | AD02132 | AM03258-AS | AM03223-SS | AD02512 | AM03281-AS | AM03296-SS |
| AD00584 | AM01253-AS | AM01186-SS | AD02133 | AM03258-AS | AM03224-SS | AD02513 | AM03282-AS | AM03296-SS |
| AD00585 | AM01254-AS | AM01187-SS | AD02134 | AM03258-AS | AM03225-SS | AD02514 | AM03283-AS | AM03296-SS |
| AD00586 | AM01255-AS | AM01188-SS | AD02135 | AM03258-AS | AM03226-SS | AD02515 | AM03284-AS | AM03296-SS |
| AD00587 | AM01256-AS | AM01189-SS | AD02136 | AM03258-AS | AM03227-SS | AD02516 | AM03300-AS | AM03296-SS |
| AD00588 | AM01257-AS | AM01190-SS | AD02137 | AM03258-AS | AM03228-SS | AD02517 | AM03301-AS | AM03296-SS |
| AD00589 | AM01258-AS | AM01191-SS | AD02138 | AM03258-AS | AM03229-SS | AD02518 | AM03107-AS | AM03297-SS |
| AD00590 | AM01259-AS | AM01192-SS | AD02139 | AM03258-AS | AM03230-SS | AD02519 | AM03279-AS | AM03297-SS |
| AD00591 | AM01260-AS | AM01193-SS | AD02140 | AM03258-AS | AM03231-SS | AD02520 | AM03280-AS | AM03297-SS |
| AD00592 | AM01261-AS | AM01194-SS | AD02141 | AM03258-AS | AM03232-SS | AD02521 | AM03281-AS | AM03297-SS |
| AD00593 | AM01262-AS | AM01195-SS | AD02142 | AM03258-AS | AM03233-SS | AD02522 | AM03282-AS | AM03297-SS |
| AD00594 | AM01263-AS | AM01196-SS | AD02143 | AM03258-AS | AM03234-SS | AD02523 | AM03283-AS | AM03297-SS |
| AD00595 | AM01264-AS | AM01197-SS | AD02144 | AM03258-AS | AM03235-SS | AD02524 | AM03284-AS | AM03297-SS |
| AD00596 | AM01265-AS | AM01198-SS | AD02145 | AM03258-AS | AM03236-SS | AD02525 | AM03300-AS | AM03297-SS |
| AD00597 | AM01266-AS | AM01199-SS | AD02146 | AM03258-AS | AM03237-SS | AD02526 | AM03301-AS | AM03297-SS |
| AD00598 | AM01267-AS | AM01200-SS | AD02147 | AM03259-AS | AM03220-SS | AD02527 | AM03107-AS | AM03298-SS |
| AD00599 | AM01268-AS | AM01201-SS | AD02148 | AM03259-AS | AM03221-SS | AD02528 | AM03279-AS | AM03298-SS |
| AD00600 | AM01269-AS | AM01202-SS | AD02149 | AM03259-AS | AM03222-SS | AD02529 | AM03280-AS | AM03298-SS |
| AD00601 | AM01270-AS | AM01203-SS | AD02150 | AM03259-AS | AM03223-SS | AD02530 | AM03281-AS | AM03298-SS |
| AD00602 | AM01271-AS | AM01204-SS | AD02151 | AM03259-AS | AM03224-SS | AD02531 | AM03282-AS | AM03298-SS |
| AD00603 | AM01272-AS | AM01205-SS | AD02152 | AM03259-AS | AM03225-SS | AD02532 | AM03283-AS | AM03298-SS |
| AD00604 | AM01273-AS | AM01206-SS | AD02153 | AM03259-AS | AM03226-SS | AD02533 | AM03284-AS | AM03298-SS |
| AD00605 | AM01274-AS | AM01207-SS | AD02154 | AM03259-AS | AM03227-SS | AD02534 | AM03300-AS | AM03298-SS |
| AD00606 | AM01275-AS | AM01208-SS | AD02155 | AM03259-AS | AM03228-SS | AD02535 | AM03301-AS | AM03298-SS |
| AD00607 | AM01276-AS | AM01209-SS | AD02156 | AM03259-AS | AM03229-SS | AD02536 | AM03107-AS | AM03299-SS |
| AD00608 | AM01277-AS | AM01210-SS | AD02157 | AM03259-AS | AM03230-SS | AD02537 | AM03279-AS | AM03299-SS |
| AD00609 | AM01278-AS | AM01211-SS | AD02158 | AM03259-AS | AM03231-SS | AD02538 | AM03280-AS | AM03299-SS |
| AD00610 | AM01279-AS | AM01212-SS | AD02159 | AM03259-AS | AM03232-SS | AD02539 | AM03281-AS | AM03299-SS |
| AD00611 | AM01280-AS | AM01213-SS | AD02160 | AM03259-AS | AM03233-SS | AD02540 | AM03282-AS | AM03299-SS |
| AD00612 | AM01281-AS | AM01214-SS | AD02161 | AM03259-AS | AM03234-SS | AD02541 | AM03283-AS | AM03299-SS |
| AD00613 | AM01282-AS | AM01215-SS | AD02162 | AM03259-AS | AM03235-SS | AD02542 | AM03284-AS | AM03299-SS |
| AD00614 | AM01283-AS | AM01216-SS | AD02163 | AM03259-AS | AM03236-SS | AD02543 | AM03300-AS | AM03299-SS |
| AD00615 | AM01284-AS | AM01217-SS | AD02164 | AM03259-AS | AM03237-SS | AD02544 | AM03301-AS | AM03299-SS |
| AD00616 | AM01285-AS | AM01218-SS | AD02165 | AM03260-AS | AM03220-SS | AD02545 | AM03301-AS | AM03277-SS |
| AD00617 | AM01286-AS | AM01219-SS | AD02166 | AM03260-AS | AM03221-SS | AD02546 | AM03107-AS | AM03275-SS |
| AD00618 | AM01287-AS | AM01220-SS | AD02167 | AM03260-AS | AM03222-SS | AD02547 | AM03107-AS | AM03276-SS |
| AD00619 | AM01288-AS | AM01221-SS | AD02168 | AM03260-AS | AM03223-SS | AD02548 | AM03107-AS | AM03277-SS |
| AD00620 | AM01289-AS | AM01222-SS | AD02169 | AM03260-AS | AM03224-SS | AD02549 | AM03107-AS | AM03278-SS |
| AD00621 | AM01290-AS | AM01223-SS | AD02170 | AM03260-AS | AM03225-SS | AD02550 | AM03107-AS | AM03287-SS |
| AD00622 | AM01291-AS | AM01224-SS | AD02171 | AM03260-AS | AM03226-SS | AD02551 | AM03107-AS | AM03288-SS |
| AD00623 | AM01292-AS | AM01225-SS | AD02172 | AM03260-AS | AM03227-SS | AD02552 | AM03107-AS | AM03289-SS |
| AD00624 | AM01293-AS | AM01226-SS | AD02173 | AM03260-AS | AM03228-SS | AD02553 | AM03107-AS | AM03290-SS |
| AD00625 | AM01294-AS | AM01227-SS | AD02174 | AM03260-AS | AM03229-SS | AD02554 | AM03279-AS | AM02537-SS |
| AD00626 | AM01295-AS | AM01228-SS | AD02175 | AM03260-AS | AM03230-SS | AD02555 | AM03280-AS | AM02537-SS |
| AD00627 | AM01296-AS | AM01229-SS | AD02176 | AM03260-AS | AM03231-SS | AD02556 | AM03281-AS | AM02537-SS |
| AD00628 | AM01297-AS | AM01230-SS | AD02177 | AM03260-AS | AM03232-SS | AD02557 | AM03282-AS | AM02537-SS |
| AD00629 | AM01298-AS | AM01231-SS | AD02178 | AM03260-AS | AM03233-SS | AD02558 | AM03283-AS | AM02537-SS |
| AD00630 | AM01299-AS | AM01232-SS | AD02179 | AM03260-AS | AM03234-SS | AD02559 | AM03284-AS | AM02537-SS |
| AD00631 | AM01300-AS | AM01233-SS | AD02180 | AM03260-AS | AM03235-SS | AD02560 | AM03300-AS | AM02537-SS |
| AD00632 | AM01301-AS | AM01234-SS | AD02181 | AM03260-AS | AM03236-SS | AD02561 | AM03301-AS | AM02537-SS |
| AD00633 | AM01302-AS | AM01235-SS | AD02182 | AM03260-AS | AM03237-SS | AD02609 | AM03375-AS | AM03277-SS |
| AD00634 | AM01303-AS | AM01236-SS | AD02183 | AM03261-AS | AM03220-SS | AD02610 | AM03376-AS | AM03277-SS |
| AD00635 | AM01304-AS | AM01237-SS | AD02184 | AM03261-AS | AM03221-SS | AD02611 | AM03375-AS | AM03278-SS |
| AD00636 | AM01305-AS | AM01238-SS | AD02185 | AM03261-AS | AM03222-SS | AD02612 | AM03376-AS | AM03278-SS |
| AD00637 | AM01306-AS | AM01239-SS | AD02186 | AM03261-AS | AM03223-SS | AD02613 | AM03375-AS | AM03289-SS |
| AD01068 | AM01796-AS | AM01795-SS | AD02187 | AM03261-AS | AM03224-SS | AD02614 | AM03376-AS | AM03289-SS |
| AD01069 | AM01798-AS | AM01797-SS | AD02188 | AM03261-AS | AM03225-SS | AD02615 | AM03377-AS | AM02941-SS |
| AD01070 | AM01800-AS | AM01799-SS | AD02189 | AM03261-AS | AM03226-SS | AD02616 | AM03259-AS | AM02941-SS |
| AD01071 | AM01802-AS | AM01801-SS | AD02190 | AM03261-AS | AM03227-SS | AD02617 | AM03377-AS | AM02942-SS |
| AD01072 | AM01804-AS | AM01803-SS | AD02191 | AM03261-AS | AM03228-SS | AD02618 | AM03259-AS | AM02942-SS |
| AD01073 | AM01806-AS | AM01805-SS | AD02192 | AM03261-AS | AM03229-SS | AD02619 | AM03377-AS | AM03243-SS |
| AD01074 | AM01808-AS | AM01807-SS | AD02193 | AM03261-AS | AM03230-SS | AD02620 | AM03259-AS | AM03243-SS |
| AD01075 | AM01810-AS | AM01809-SS | AD02194 | AM03261-AS | AM03231-SS | AD02662 | AM02860-AS | AM03424-SS |
| AD01076 | AM01812-AS | AM01811-SS | AD02195 | AM03261-AS | AM03232-SS | AD02663 | AM02860-AS | AM03425-SS |
| AD01077 | AM01814-AS | AM01813-SS | AD02196 | AM03261-AS | AM03233-SS | AD02664 | AM03427-AS | AM03426-SS |
| AD01078 | AM01816-AS | AM01815-SS | AD02197 | AM03261-AS | AM03234-SS | AD02682 | AM02775-AS | AM03457-SS |
| AD01079 | AM01818-AS | AM01817-SS | AD02198 | AM03261-AS | AM03235-SS | AD02683 | AM02776-AS | AM03458-SS |
| AD01184 | AM02003-AS | AM02006-SS | AD02199 | AM03261-AS | AM03236-SS | AD02684 | AM02783-AS | AM03459-SS |
| AD01185 | AM02004-AS | AM02006-SS | AD02200 | AM03261-AS | AM03237-SS | AD02685 | AM02785-AS | AM03460-SS |
| AD01186 | AM02005-AS | AM02006-SS | AD02201 | AM03262-AS | AM03220-SS | AD02686 | AM02788-AS | AM03461-SS |
| AD01187 | AM02007-AS | AM02010-SS | AD02202 | AM03262-AS | AM03221-SS | AD02687 | AM02791-AS | AM03462-SS |
| AD01188 | AM02008-AS | AM02010-SS | AD02203 | AM03262-AS | AM03222-SS | AD02696 | AM02860-AS | AM03243-SS |
| AD01189 | AM02009-AS | AM02010-SS | AD02204 | AM03262-AS | AM03223-SS | AD02697 | AM03107-AS | AM03277-SS |
| AD01190 | AM02011-AS | AM02014-SS | AD02205 | AM03262-AS | AM03224-SS | AD02698 | AM03107-AS | AM03278-SS |
| AD01191 | AM02012-AS | AM02014-SS | AD02206 | AM03262-AS | AM03225-SS | AD02699 | AM03107-AS | AM03289-SS |
| AD01192 | AM02013-AS | AM02014-SS | AD02207 | AM03262-AS | AM03226-SS | AD02710 | AM03486-AS | AM03489-SS |
| AD01193 | AM02015-AS | AM02018-SS | AD02208 | AM03262-AS | AM03227-SS | AD02711 | AM03487-AS | AM03489-SS |
| AD01194 | AM02016-AS | AM02018-SS | AD02209 | AM03262-AS | AM03228-SS | AD02712 | AM03488-AS | AM03489-SS |
| AD01195 | AM02017-AS | AM02018-SS | AD02210 | AM03262-AS | AM03229-SS | AD02713 | AM02860-AS | AM03489-SS |
| AD01196 | AM02019-AS | AM02022-SS | AD02211 | AM03262-AS | AM03230-SS | AD02714 | AM03490-AS | AM03492-SS |
| AD01197 | AM02020-AS | AM02022-SS | AD02212 | AM03262-AS | AM03231-SS | AD02715 | AM03491-AS | AM03492-SS |
| AD01198 | AM02021-AS | AM02022-SS | AD02213 | AM03262-AS | AM03232-SS | AD02716 | AM02531-AS | AM03492-SS |
| AD01199 | AM02023-AS | AM02026-SS | AD02214 | AM03262-AS | AM03233-SS | AD02717 | AM03107-AS | AM03492-SS |
| AD01200 | AM02024-AS | AM02026-SS | AD02215 | AM03262-AS | AM03234-SS | AD02745 | AM03107-AS | AM03544-SS |
| AD01201 | AM02025-AS | AM02026-SS | AD02216 | AM03262-AS | AM03235-SS | AD02746 | AM03283-AS | AM03544-SS |
| AD01202 | AM02027-AS | AM02030-SS | AD02217 | AM03262-AS | AM03236-SS | AD02747 | AM03300-AS | AM03544-SS |
| AD01203 | AM02028-AS | AM02030-SS | AD02218 | AM03262-AS | AM03237-SS | AD02748 | AM03107-AS | AM03545-SS |
| AD01204 | AM02029-AS | AM02030-SS | AD02219 | AM03263-AS | AM03220-SS | AD02749 | AM03283-AS | AM03545-SS |
| AD01205 | AM02031-AS | AM02034-SS | AD02220 | AM03263-AS | AM03221-SS | AD02750 | AM03300-AS | AM03545-SS |
| AD01206 | AM02032-AS | AM02034-SS | AD02221 | AM03263-AS | AM03222-SS | AD02751 | AM03107-AS | AM03546-SS |
| AD01207 | AM02033-AS | AM02034-SS | AD02222 | AM03263-AS | AM03223-SS | AD02752 | AM03283-AS | AM03546-SS |
| AD01208 | AM02035-AS | AM02038-SS | AD02223 | AM03263-AS | AM03224-SS | AD02753 | AM03300-AS | AM03546-SS |
| AD01209 | AM02036-AS | AM02038-SS | AD02224 | AM03263-AS | AM03225-SS | AD02754 | AM02534-AS | AM03547-SS |
| AD01210 | AM02037-AS | AM02038-SS | AD02225 | AM03263-AS | AM03226-SS | AD02755 | AM02857-AS | AM03547-SS |
| AD01211 | AM02039-AS | AM02042-SS | AD02226 | AM03263-AS | AM03227-SS | AD02819 | AM03377-AS | AM03650-SS |
| AD01212 | AM02040-AS | AM02042-SS | AD02227 | AM03263-AS | AM03228-SS | AD02820 | AM03259-AS | AM03650-SS |
| AD01213 | AM02041-AS | AM02042-SS | AD02228 | AM03263-AS | AM03229-SS | AD02821 | AM03129-AS | AM03651-SS |
| AD01328 | AM02240-AS | AM02211-SS | AD02229 | AM03263-AS | AM03230-SS | AD02825 | AM03655-AS | AM03650-SS |
| AD01329 | AM02241-AS | AM02212-SS | AD02230 | AM03263-AS | AM03231-SS | AD02826 | AM03656-AS | AM03650-SS |
| AD01330 | AM02242-AS | AM02213-SS | AD02231 | AM03263-AS | AM03232-SS | AD02827 | AM03657-AS | AM03650-SS |
| AD01331 | AM02243-AS | AM02214-SS | AD02232 | AM03263-AS | AM03233-SS | AD02828 | AM03658-AS | AM03650-SS |
| AD01332 | AM02244-AS | AM02215-SS | AD02233 | AM03263-AS | AM03234-SS | AD02829 | AM03659-AS | AM03650-SS |
| AD01333 | AM02245-AS | AM02216-SS | AD02234 | AM03263-AS | AM03235-SS | AD02830 | AM03660-AS | AM03650-SS |
| AD01334 | AM02246-AS | AM02217-SS | AD02235 | AM03263-AS | AM03236-SS | AD02831 | AM03661-AS | AM03650-SS |
| AD01335 | AM02247-AS | AM02218-SS | AD02236 | AM03263-AS | AM03237-SS | AD02832 | AM03269-AS | AM03650-SS |
| AD01336 | AM02248-AS | AM02219-SS | AD02237 | AM03264-AS | AM03220-SS | AD02841 | AM03671-AS | AM03670-SS |
| AD01337 | AM02249-AS | AM02220-SS | AD02238 | AM03264-AS | AM03221-SS | AD02842 | AM03672-AS | AM03546-SS |
| AD01338 | AM02250-AS | AM02221-SS | AD02239 | AM03264-AS | AM03222-SS | AD02843 | AM03673-AS | AM03546-SS |
| AD01339 | AM02251-AS | AM02222-SS | AD02240 | AM03264-AS | AM03223-SS | AD02844 | AM03674-AS | AM03546-SS |
| AD01340 | AM02252-AS | AM02223-SS | AD02241 | AM03264-AS | AM03224-SS | AD02845 | AM03675-AS | AM03546-SS |
| AD01341 | AM02253-AS | AM02224-SS | AD02242 | AM03264-AS | AM03225-SS | AD02846 | AM03676-AS | AM03546-SS |
| AD01342 | AM02254-AS | AM02225-SS | AD02243 | AM03264-AS | AM03226-SS | AD02847 | AM03677-AS | AM03546-SS |
| AD01343 | AM02255-AS | AM02226-SS | AD02244 | AM03264-AS | AM03227-SS | AD02848 | AM03678-AS | AM03650-SS |
| AD01344 | AM02256-AS | AM02227-SS | AD02245 | AM03264-AS | AM03228-SS | AD02849 | AM03679-AS | AM03650-SS |
| AD01345 | AM02257-AS | AM02228-SS | AD02246 | AM03264-AS | AM03229-SS | AD02850 | AM03680-AS | AM03650-SS |
| AD01346 | AM02258-AS | AM02229-SS | AD02247 | AM03264-AS | AM03230-SS | AD02851 | AM03681-AS | AM03650-SS |
| AD01347 | AM02259-AS | AM02230-SS | AD02248 | AM03264-AS | AM03231-SS | AD02852 | AM03682-AS | AM03650-SS |
| AD01348 | AM02260-AS | AM02231-SS | AD02249 | AM03264-AS | AM03232-SS | AD02853 | AM02860-AS | AM03237-SS |
| AD01349 | AM02261-AS | AM02232-SS | AD02250 | AM03264-AS | AM03233-SS | AD02854 | AM03377-AS | AM03225-SS |
| AD01350 | AM02262-AS | AM02233-SS | AD02251 | AM03264-AS | AM03234-SS | AD02855 | AM03129-AS | AM03683-SS |
| AD01351 | AM02263-AS | AM02234-SS | AD02252 | AM03264-AS | AM03235-SS | AD02907 | AM02775-AS | AM03741-SS |
| AD01352 | AM02264-AS | AM02235-SS | AD02253 | AM03264-AS | AM03236-SS | AD02908 | AM02775-AS | AM03742-SS |
| AD01353 | AM02265-AS | AM02236-SS | AD02254 | AM03264-AS | AM03237-SS | AD02909 | AM02775-AS | AM03743-SS |
| AD01354 | AM02266-AS | AM02237-SS | AD02255 | AM03265-AS | AM03220-SS | AD02910 | AM03744-AS | AM03457-SS |
| AD01355 | AM02267-AS | AM02238-SS | AD02256 | AM03265-AS | AM03221-SS | AD02911 | AM03745-AS | AM03457-SS |
| AD01356 | AM02268-AS | AM02239-SS | AD02257 | AM03265-AS | AM03222-SS | AD02912 | AM03745-AS | AM03742-SS |
| AD01462 | AM02404-AS | AM02441-SS | AD02258 | AM03265-AS | AM03223-SS | AD02913 | AM02776-AS | AM03746-SS |
| AD01463 | AM02406-AS | AM02442-SS | AD02259 | AM03265-AS | AM03224-SS | AD02914 | AM02776-AS | AM03747-SS |
| AD01464 | AM02408-AS | AM02443-SS | AD02260 | AM03265-AS | AM03225-SS | AD02915 | AM02776-AS | AM03748-SS |
| AD01465 | AM02410-AS | AM02444-SS | AD02261 | AM03265-AS | AM03226-SS | AD02916 | AM03749-AS | AM03458-SS |
| AD01466 | AM02412-AS | AM02445-SS | AD02262 | AM03265-AS | AM03227-SS | AD02917 | AM03750-AS | AM03458-SS |
| AD01467 | AM02414-AS | AM02446-SS | AD02263 | AM03265-AS | AM03228-SS | AD02918 | AM03750-AS | AM03747-SS |
| AD01468 | AM02416-AS | AM02447-SS | AD02264 | AM03265-AS | AM03229-SS | AD02919 | AM02788-AS | AM03751-SS |
| AD01469 | AM02418-AS | AM02448-SS | AD02265 | AM03265-AS | AM03230-SS | AD02920 | AM02788-AS | AM03752-SS |
| AD01529 | AM02531-AS | AM02537-SS | AD02266 | AM03265-AS | AM03231-SS | AD02921 | AM02788-AS | AM03753-SS |
| AD01530 | AM02532-AS | AM02538-SS | AD02267 | AM03265-AS | AM03232-SS | AD02922 | AM03754-AS | AM03461-SS |
| AD01531 | AM02533-AS | AM02539-SS | AD02268 | AM03265-AS | AM03233-SS | AD02923 | AM03755-AS | AM03461-SS |
| AD01532 | AM02534-AS | AM02540-SS | AD02269 | AM03265-AS | AM03234-SS | AD02924 | AM03756-AS | AM03461-SS |
| AD01533 | AM02535-AS | AM02541-SS | AD02270 | AM03265-AS | AM03235-SS | AD02925 | AM03756-AS | AM03752-SS |
| AD01534 | AM02536-AS | AM02542-SS | AD02271 | AM03265-AS | AM03236-SS | AD02926 | AM02791-AS | AM03757-SS |
| AD01708 | AM02755-AS | AM02793-SS | AD02272 | AM03265-AS | AM03237-SS | AD02927 | AM02791-AS | AM03758-SS |
| AD01709 | AM02756-AS | AM02794-SS | AD02273 | AM03266-AS | AM03220-SS | AD02928 | AM02791-AS | AM03759-SS |
| AD01710 | AM02757-AS | AM02795-SS | AD02274 | AM03266-AS | AM03221-SS | AD02929 | AM03760-AS | AM03462-SS |
| AD01711 | AM02758-AS | AM02796-SS | AD02275 | AM03266-AS | AM03222-SS | AD02930 | AM03761-AS | AM03462-SS |
| AD01712 | AM02759-AS | AM02797-SS | AD02276 | AM03266-AS | AM03223-SS | AD02931 | AM03762-AS | AM03462-SS |
| AD01713 | AM02760-AS | AM02798-SS | AD02277 | AM03266-AS | AM03224-SS | AD02932 | AM03762-AS | AM03758-SS |
| AD01714 | AM02761-AS | AM02799-SS | AD02278 | AM03266-AS | AM03225-SS | AD03049 | AM03856-AS | AM03650-SS |
| AD01715 | AM02762-AS | AM02800-SS | AD02279 | AM03266-AS | AM03226-SS | AD03050 | AM03857-AS | AM03651-SS |
| AD01716 | AM02763-AS | AM02801-SS | AD02280 | AM03266-AS | AM03227-SS | AD03051 | AM03377-AS | AM03859-SS |
| AD01717 | AM02764-AS | AM02802-SS | AD02281 | AM03266-AS | AM03228-SS | AD03052 | AM03129-AS | AM03861-SS |
| AD01718 | AM02765-AS | AM02803-SS | AD02282 | AM03266-AS | AM03229-SS | AD03053 | AM03862-AS | AM03650-SS |
| AD01719 | AM02766-AS | AM02804-SS | AD02283 | AM03266-AS | AM03230-SS | AD03054 | AM03259-AS | AM03859-SS |
| AD01720 | AM02767-AS | AM02805-SS | AD02284 | AM03266-AS | AM03231-SS | AD03058 | AM03866-AS | AM03546-SS |
| AD01721 | AM02768-AS | AM02806-SS | AD02285 | AM03266-AS | AM03232-SS | AD03059 | AM03867-AS | AM03546-SS |
| AD01722 | AM02769-AS | AM02807-SS | AD02286 | AM03266-AS | AM03233-SS | AD03060 | AM03868-AS | AM03546-SS |
| AD01723 | AM02770-AS | AM02808-SS | AD02287 | AM03266-AS | AM03234-SS | AD03061 | AM03869-AS | AM03546-SS |
| AD01724 | AM02771-AS | AM02809-SS | AD02288 | AM03266-AS | AM03235-SS | AD03062 | AM03870-AS | AM03546-SS |
| AD01725 | AM02772-AS | AM02810-SS | AD02289 | AM03266-AS | AM03236-SS | AD03063 | AM03871-AS | AM03546-SS |
| AD01726 | AM02773-AS | AM02811-SS | AD02290 | AM03266-AS | AM03237-SS | AD03064 | AM03872-AS | AM03546-SS |
| AD01727 | AM02774-AS | AM02793-SS | AD02291 | AM03267-AS | AM03220-SS | AD03065 | AM03873-AS | AM03546-SS |
| AD01728 | AM02775-AS | AM02794-SS | AD02292 | AM03267-AS | AM03221-SS | AD03066 | AM03874-AS | AM03546-SS |
| AD01729 | AM02776-AS | AM02795-SS | AD02293 | AM03267-AS | AM03222-SS | AD03067 | AM03875-AS | AM03546-SS |
| AD01730 | AM02777-AS | AM02796-SS | AD02294 | AM03267-AS | AM03223-SS | AD03068 | AM03876-AS | AM03546-SS |
| AD01731 | AM02778-AS | AM02797-SS | AD02295 | AM03267-AS | AM03224-SS | AD03069 | AM03877-AS | AM03546-SS |
| AD01732 | AM02779-AS | AM02798-SS | AD02296 | AM03267-AS | AM03225-SS | AD03070 | AM03878-AS | AM03546-SS |
| AD01733 | AM02780-AS | AM02799-SS | AD02297 | AM03267-AS | AM03226-SS | AD03071 | AM03883-AS | AM03879-SS |
| AD01734 | AM02781-AS | AM02800-SS | AD02298 | AM03267-AS | AM03227-SS | AD03072 | AM03884-AS | AM03880-SS |
| AD01735 | AM02782-AS | AM02801-SS | AD02299 | AM03267-AS | AM03228-SS | AD03073 | AM03883-AS | AM03881-SS |
| AD01736 | AM02783-AS | AM02802-SS | AD02300 | AM03267-AS | AM03229-SS | AD03074 | AM03885-AS | AM03882-SS |
| AD01737 | AM02784-AS | AM02803-SS | AD02301 | AM03267-AS | AM03230-SS | AD03075 | AM03129-AS | AM03546-SS |
| AD01738 | AM02785-AS | AM02804-SS | AD02302 | AM03267-AS | AM03231-SS | AD03114 | AM03929-AS | AM03651-SS |
| AD01739 | AM02786-AS | AM02805-SS | AD02303 | AM03267-AS | AM03232-SS | AD03115 | AM03930-AS | AM03651-SS |
| AD01740 | AM02787-AS | AM02806-SS | AD02304 | AM03267-AS | AM03233-SS | AD03116 | AM03129-AS | AM03928-SS |
| AD01741 | AM02788-AS | AM02807-SS | AD02305 | AM03267-AS | AM03234-SS | AD03117 | AM03929-AS | AM03928-SS |
| AD01742 | AM02789-AS | AM02808-SS | AD02306 | AM03267-AS | AM03235-SS | AD03118 | AM03930-AS | AM03928-SS |
| AD01743 | AM02790-AS | AM02809-SS | AD02307 | AM03267-AS | AM03236-SS | AD03119 | AM03932-AS | AM03650-SS |
| AD01744 | AM02791-AS | AM02810-SS | AD02308 | AM03267-AS | AM03237-SS | AD03120 | AM03933-AS | AM03650-SS |
| AD01745 | AM02792-AS | AM02811-SS | AD02309 | AM03268-AS | AM03220-SS | AD03121 | AM03377-AS | AM03931-SS |
| AD01746 | AM02774-AS | AM02812-SS | AD02310 | AM03268-AS | AM03221-SS | AD03122 | AM03932-AS | AM03931-SS |
| AD01747 | AM02775-AS | AM02813-SS | AD02311 | AM03268-AS | AM03222-SS | AD03123 | AM03933-AS | AM03931-SS |
| AD01748 | AM02776-AS | AM02814-SS | AD02312 | AM03268-AS | AM03223-SS | AD03156 | AM03969-AS | AM03968-SS |
| AD01749 | AM02777-AS | AM02815-SS | AD02313 | AM03268-AS | AM03224-SS | AD03157 | AM03971-AS | AM03970-SS |
| AD01750 | AM02778-AS | AM02816-SS | AD02314 | AM03268-AS | AM03225-SS | AD03158 | AM03972-AS | AM03970-SS |
| AD01751 | AM02779-AS | AM02817-SS | AD02315 | AM03268-AS | AM03226-SS | AD03159 | AM03973-AS | AM03970-SS |
| AD01752 | AM02780-AS | AM02818-SS | AD02316 | AM03268-AS | AM03227-SS | AD03170 | AM03823-AS | AM03651-SS |
| AD01753 | AM02781-AS | AM02819-SS | AD02317 | AM03268-AS | AM03228-SS | AD03171 | AM03824-AS | AM03651-SS |
| AD01754 | AM02782-AS | AM02820-SS | AD02318 | AM03268-AS | AM03229-SS | AD03172 | AM03825-AS | AM03651-SS |
| AD01755 | AM02783-AS | AM02821-SS | AD02319 | AM03268-AS | AM03230-SS | AD03173 | AM03826-AS | AM03651-SS |
| AD01756 | AM02784-AS | AM02822-SS | AD02320 | AM03268-AS | AM03231-SS | AD03174 | AM03827-AS | AM03650-SS |
| AD01757 | AM02785-AS | AM02823-SS | AD02321 | AM03268-AS | AM03232-SS | AD03175 | AM03828-AS | AM03650-SS |
| AD01758 | AM02786-AS | AM02824-SS | AD02322 | AM03268-AS | AM03233-SS | AD03272 | AM02860-AS | AM04138-SS |
| AD01759 | AM02787-AS | AM02825-SS | AD02323 | AM03268-AS | AM03234-SS | AD03273 | AM03377-AS | AM04138-SS |
| AD01760 | AM02788-AS | AM02826-SS | AD02324 | AM03268-AS | AM03235-SS | AD03274 | AM04132-AS | AM04138-SS |
| AD01761 | AM02789-AS | AM02827-SS | AD02325 | AM03268-AS | AM03236-SS | AD03275 | AM04133-AS | AM04138-SS |
| AD01762 | AM02790-AS | AM02828-SS | AD02326 | AM03268-AS | AM03237-SS | AD03276 | AM04134-AS | AM04138-SS |
| AD01763 | AM02791-AS | AM02829-SS | AD02327 | AM03269-AS | AM03220-SS | AD03277 | AM04135-AS | AM04138-SS |
| AD01764 | AM02792-AS | AM02830-SS | AD02328 | AM03269-AS | AM03221-SS | AD03278 | AM04136-AS | AM04138-SS |
| AD01765 | AM02857-AS | AM02540-SS | AD02329 | AM03269-AS | AM03222-SS | AD03279 | AM04137-AS | AM04138-SS |
| AD01766 | AM02858-AS | AM02540-SS | AD02330 | AM03269-AS | AM03223-SS | AD03291 | AM04150-AS | AM04152-SS |
| AD01767 | AM02859-AS | AM02540-SS | AD02331 | AM03269-AS | AM03224-SS | AD03327 | AM04150-AS | AM04214-SS |
| AD01768 | AM02860-AS | AM02540-SS | AD02332 | AM03269-AS | AM03225-SS | AD03341 | AM04133-AS | AM04233-SS |
| AD01769 | AM02859-AS | AM02861-SS | AD02333 | AM03269-AS | AM03226-SS | AD03351 | AM04250-AS | AM03742-SS |
| AD01770 | AM02860-AS | AM02861-SS | AD02334 | AM03269-AS | AM03227-SS | AD03352 | AM04251-AS | AM03742-SS |
| AD01772 | AM02863-AS | AM02541-SS | AD02335 | AM03269-AS | AM03228-SS | AD03353 | AM04252-AS | AM03742-SS |
| AD01773 | AM02864-AS | AM02541-SS | AD02336 | AM03269-AS | AM03229-SS | AD03354 | AM04253-AS | AM03747-SS |
| AD01774 | AM02865-AS | AM02541-SS | AD02337 | AM03269-AS | AM03230-SS | AD03355 | AM04254-AS | AM03747-SS |
| AD01780 | AM02866-AS | AM02541-SS | AD02338 | AM03269-AS | AM03231-SS | AD03356 | AM04255-AS | AM03747-SS |
| AD01803 | AM02534-AS | AM02941-SS | AD02339 | AM03269-AS | AM03232-SS | AD03357 | AM04256-AS | AM03752-SS |
| AD01804 | AM02534-AS | AM02942-SS | AD02340 | AM03269-AS | AM03233-SS | AD03358 | AM04257-AS | AM03752-SS |
| AD01805 | AM02943-AS | AM02540-SS | AD02341 | AM03269-AS | AM03234-SS | AD03359 | AM04258-AS | AM03752-SS |
| AD01806 | AM02943-AS | AM02941-SS | AD02342 | AM03269-AS | AM03235-SS | AD03360 | AM04259-AS | AM03758-SS |
| AD01807 | AM02943-AS | AM02942-SS | AD02343 | AM03269-AS | AM03236-SS | AD03361 | AM04260-AS | AM03758-SS |
| AD01808 | AM02944-AS | AM02540-SS | AD02344 | AM03269-AS | AM03237-SS | AD03362 | AM04261-AS | AM03758-SS |
| AD01809 | AM02944-AS | AM02941-SS | AD02345 | AM03270-AS | AM03220-SS | AD03421 | AM04133-AS | AM04372-SS |
| AD01810 | AM02944-AS | AM02942-SS | AD02346 | AM03270-AS | AM03221-SS | AD03424 | AM04215-AS | AM03546-SS |
| AD01811 | AM02945-AS | AM02540-SS | AD02347 | AM03270-AS | AM03222-SS | AD03425 | AM04216-AS | AM03546-SS |
| AD01812 | AM02945-AS | AM02941-SS | AD02348 | AM03270-AS | AM03223-SS | AD03426 | AM04217-AS | AM03546-SS |
| AD01813 | AM02945-AS | AM02942-SS | AD02349 | AM03270-AS | AM03224-SS | AD03427 | AM04218-AS | AM03546-SS |
| AD01814 | AM02535-AS | AM02946-SS | AD02350 | AM03270-AS | AM03225-SS | AD03428 | AM04219-AS | AM03546-SS |
| AD01815 | AM02535-AS | AM02947-SS | AD02351 | AM03270-AS | AM03226-SS | AD03430 | AM04377-AS | AM04381-SS |
| AD01816 | AM02535-AS | AM02948-SS | AD02352 | AM03270-AS | AM03227-SS | AD03431 | AM04378-AS | AM04382-SS |
| AD01817 | AM02535-AS | AM02949-SS | AD02353 | AM03270-AS | AM03228-SS | AD03432 | AM04379-AS | AM04381-SS |
| AD01818 | AM02950-AS | AM02541-SS | AD02354 | AM03270-AS | AM03229-SS | AD03433 | AM04380-AS | AM04382-SS |
| AD01819 | AM02950-AS | AM02946-SS | AD02355 | AM03270-AS | AM03230-SS | AD03434 | AM04383-AS | AM04391-SS |
| AD01820 | AM02950-AS | AM02947-SS | AD02356 | AM03270-AS | AM03231-SS | AD03435 | AM04384-AS | AM04392-SS |
| AD01821 | AM02950-AS | AM02948-SS | AD02357 | AM03270-AS | AM03232-SS | AD03436 | AM04385-AS | AM04391-SS |
| AD01822 | AM02950-AS | AM02949-SS | AD02358 | AM03270-AS | AM03233-SS | AD03437 | AM04386-AS | AM04392-SS |
| AD01823 | AM02951-AS | AM02541-SS | AD02359 | AM03270-AS | AM03234-SS | AD03438 | AM04387-AS | AM04391-SS |
| AD01824 | AM02951-AS | AM02946-SS | AD02360 | AM03270-AS | AM03235-SS | AD03439 | AM04388-AS | AM04392-SS |
| AD01825 | AM02951-AS | AM02947-SS | AD02361 | AM03270-AS | AM03236-SS | AD03440 | AM04389-AS | AM04391-SS |
| AD01826 | AM02951-AS | AM02948-SS | AD02362 | AM03270-AS | AM03237-SS | AD03441 | AM04390-AS | AM04392-SS |
| AD01827 | AM02951-AS | AM02949-SS | AD02363 | AM03271-AS | AM03220-SS | AD03460 | AM03300-AS | AM04412-SS |
| AD01828 | AM02952-AS | AM02541-SS | AD02364 | AM03271-AS | AM03221-SS | AD03461 | AM04413-AS | AM04414-SS |
| AD01829 | AM02952-AS | AM02946-SS | AD02365 | AM03271-AS | AM03222-SS | AD03462 | AM04415-AS | AM04416-SS |
| AD01830 | AM02952-AS | AM02947-SS | AD02366 | AM03271-AS | AM03223-SS | AD03463 | AM04417-AS | AM04412-SS |
| AD01831 | AM02952-AS | AM02948-SS | AD02367 | AM03271-AS | AM03224-SS | AD03494 | AM04437-AS | AM03742-SS |
| AD01832 | AM02952-AS | AM02949-SS | AD02368 | AM03271-AS | AM03225-SS | AD03495 | AM04438-AS | AM03747-SS |
| AD01895 | AM02863-AS | AM03030-SS | AD02369 | AM03271-AS | AM03226-SS | AD03496 | AM04439-AS | AM03752-SS |
| AD01896 | AM02865-AS | AM03036-SS | AD02370 | AM03271-AS | AM03227-SS | AD03497 | AM04440-AS | AM03758-SS |
| AD01897 | AM02865-AS | AM03037-SS | AD02371 | AM03271-AS | AM03228-SS | AD03536 | AM03972-AS | AM04496-SS |
| AD01898 | AM02865-AS | AM03038-SS | AD02372 | AM03271-AS | AM03229-SS | AD03537 | AM02860-AS | AM04497-SS |
| AD01899 | AM03040-AS | AM03039-SS | AD02373 | AM03271-AS | AM03230-SS | AD03538 | AM03972-AS | AM04499-SS |
| AD01900 | AM03041-AS | AM03039-SS | AD02374 | AM03271-AS | AM03231-SS | AD03539 | AM04415-AS | AM04498-SS |
| AD01901 | AM03041-AS | AM03042-SS | AD02375 | AM03271-AS | AM03232-SS | AD03540 | AM03972-AS | AM04500-SS |
| AD01902 | AM02863-AS | AM03042-SS | AD02376 | AM03271-AS | AM03233-SS | AD03541 | AM04501-AS | AM03970-SS |
| AD01903 | AM03043-AS | AM03042-SS | AD02377 | AM03271-AS | AM03234-SS | AD03542 | AM02860-AS | AM04502-SS |
| AD01912 | AM03065-AS | AM03060-SS | AD02378 | AM03271-AS | AM03235-SS | AD03547 | AM04507-AS | AM04498-SS |
| AD01913 | AM03066-AS | AM03060-SS | AD02379 | AM03271-AS | AM03236-SS | AD03548 | AM02860-AS | AM04498-SS |
| AD01914 | AM03067-AS | AM03060-SS | AD02380 | AM03271-AS | AM03237-SS | AD03549 | AM04507-AS | AM04502-SS |
| AD01915 | AM03068-AS | AM03060-SS | AD02381 | AM03272-AS | AM03220-SS | AD03573 | AM04539-AS | AM04535-SS |
| AD01916 | AM03069-AS | AM03060-SS | AD02382 | AM03272-AS | AM03221-SS | AD03574 | AM04540-AS | AM04536-SS |
| AD01917 | AM03070-AS | AM03060-SS | AD02383 | AM03272-AS | AM03222-SS | AD03575 | AM04541-AS | AM04537-SS |
| AD01918 | AM03065-AS | AM03061-SS | AD02384 | AM03272-AS | AM03223-SS | AD03576 | AM04542-AS | AM04538-SS |
| AD01919 | AM03066-AS | AM03061-SS | AD02385 | AM03272-AS | AM03224-SS | AD03577 | AM04544-AS | AM04543-SS |
| AD01920 | AM03067-AS | AM03061-SS | AD02386 | AM03272-AS | AM03225-SS | AD03578 | AM04545-AS | AM04500-SS |
| AD01921 | AM03068-AS | AM03061-SS | AD02387 | AM03272-AS | AM03226-SS | AD03579 | AM04546-AS | AM04500-SS |
| AD01922 | AM03069-AS | AM03061-SS | AD02388 | AM03272-AS | AM03227-SS | AD03603 | AM04582-AS | AM04578-SS |
| AD01923 | AM03070-AS | AM03061-SS | AD02389 | AM03272-AS | AM03228-SS | AD03604 | AM04583-AS | AM04578-SS |
| AD01924 | AM03065-AS | AM03062-SS | AD02390 | AM03272-AS | AM03229-SS | AD03605 | AM04584-AS | AM04578-SS |
| AD01925 | AM03066-AS | AM03062-SS | AD02391 | AM03272-AS | AM03230-SS | AD03606 | AM04585-AS | AM04578-SS |
| AD01926 | AM03067-AS | AM03062-SS | AD02392 | AM03272-AS | AM03231-SS | AD03607 | AM04586-AS | AM04578-SS |
| AD01927 | AM03068-AS | AM03062-SS | AD02393 | AM03272-AS | AM03232-SS | AD03608 | AM04587-AS | AM04578-SS |
| AD01928 | AM03069-AS | AM03062-SS | AD02394 | AM03272-AS | AM03233-SS | AD03609 | AM04584-AS | AM04588-SS |
| AD01929 | AM03070-AS | AM03062-SS | AD02395 | AM03272-AS | AM03234-SS | AD03610 | AM04584-AS | AM04579-SS |
| AD01930 | AM03065-AS | AM03037-SS | AD02396 | AM03272-AS | AM03235-SS | AD03611 | AM04584-AS | AM04580-SS |
| AD01931 | AM03066-AS | AM03037-SS | AD02397 | AM03272-AS | AM03236-SS | AD03612 | AM04584-AS | AM04581-SS |
| AD01932 | AM03067-AS | AM03037-SS | AD02398 | AM03272-AS | AM03237-SS | AD03627 | AM04609-AS | AM03970-SS |
| AD01933 | AM03068-AS | AM03037-SS | AD02399 | AM03273-AS | AM03220-SS | AD03628 | AM04610-AS | AM03970-SS |
| AD01934 | AM03069-AS | AM03037-SS | AD02400 | AM03273-AS | AM03221-SS | AD03629 | AM03972-AS | AM04611-SS |
| AD01935 | AM03070-AS | AM03037-SS | AD02401 | AM03273-AS | AM03222-SS | AD03630 | AM03972-AS | AM04612-SS |
| AD01936 | AM03065-AS | AM03064-SS | AD02402 | AM03273-AS | AM03223-SS | AD03668 | AM04501-AS | AM04500-SS |
| AD01937 | AM03066-AS | AM03064-SS | AD02403 | AM03273-AS | AM03224-SS | AD03671 | AM04677-AS | AM04669-SS |
| AD01938 | AM03067-AS | AM03064-SS | AD02404 | AM03273-AS | AM03225-SS | AD03672 | AM04678-AS | AM04670-SS |
| AD01939 | AM03068-AS | AM03064-SS | AD02405 | AM03273-AS | AM03226-SS | AD03673 | AM04679-AS | AM04671-SS |
| AD01940 | AM03069-AS | AM03064-SS | AD02406 | AM03273-AS | AM03227-SS | AD03674 | AM04680-AS | AM04672-SS |
| AD01941 | AM03070-AS | AM03064-SS | AD02407 | AM03273-AS | AM03228-SS | AD03675 | AM04681-AS | AM04673-SS |
| AD01976 | AM03119-AS | AM02540-SS | AD02408 | AM03273-AS | AM03229-SS | AD03676 | AM02860-AS | AM04674-SS |
| AD01977 | AM03120-AS | AM02540-SS | AD02409 | AM03273-AS | AM03230-SS | AD03677 | AM02860-AS | AM04675-SS |
| AD01978 | AM03121-AS | AM02540-SS | AD02410 | AM03273-AS | AM03231-SS | AD03678 | AM02860-AS | AM04676-SS |
| AD01979 | AM02857-AS | AM03122-SS | AD02411 | AM03273-AS | AM03232-SS | AD03705 | AM04501-AS | AM04726-SS |
| AD01980 | AM02857-AS | AM03123-SS | AD02412 | AM03273-AS | AM03233-SS | AD03706 | AM04501-AS | AM04727-SS |
| AD01981 | AM03119-AS | AM03122-SS | AD02413 | AM03273-AS | AM03234-SS | AD03707 | AM04501-AS | AM04728-SS |
| AD01982 | AM02857-AS | AM03124-SS | AD02414 | AM03273-AS | AM03235-SS | AD03708 | AM04544-AS | AM04729-SS |
| AD01983 | AM03107-AS | AM02537-SS | AD02415 | AM03273-AS | AM03236-SS | AD03713 | AM04733-AS | AM04138-SS |
| AD01984 | AM03108-AS | AM02537-SS | AD02416 | AM03273-AS | AM03237-SS | AD03714 | AM04734-AS | AM04138-SS |
| AD01985 | AM03107-AS | AM03125-SS | AD02417 | AM03274-AS | AM03220-SS | AD03715 | AM04735-AS | AM04138-SS |
| AD01986 | AM03107-AS | AM03126-SS | AD02418 | AM03274-AS | AM03221-SS | AD03716 | AM04736-AS | AM04138-SS |
| AD01987 | AM03127-AS | AM02537-SS | AD02419 | AM03274-AS | AM03222-SS | AD03717 | AM02860-AS | AM04737-SS |
| AD01988 | AM03129-AS | AM03128-SS | AD02420 | AM03274-AS | AM03223-SS | AD03720 | AM03884-AS | AM04741-SS |
| AD01989 | AM03130-AS | AM02540-SS | AD02421 | AM03274-AS | AM03224-SS | AD03721 | AM03972-AS | AM04742-SS |
| AD01990 | AM03131-AS | AM02540-SS | AD02422 | AM03274-AS | AM03225-SS | AD03722 | AM03972-AS | AM04743-SS |
| AD02001 | AM02860-AS | AM02942-SS | AD02423 | AM03274-AS | AM03226-SS | AD03723 | AM03972-AS | AM04744-SS |
| AD02002 | AM02857-AS | AM03144-SS | AD02424 | AM03274-AS | AM03227-SS | AD03760 | AM04805-AS | AM04803-SS |
| AD02003 | AM03149-AS | AM02540-SS | AD02425 | AM03274-AS | AM03228-SS | AD03761 | AM04501-AS | AM04804-SS |
| AD02004 | AM03149-AS | AM02941-SS | AD02426 | AM03274-AS | AM03229-SS | AD03762 | AM04805-AS | AM04807-SS |
| AD02005 | AM03149-AS | AM02942-SS | AD02427 | AM03274-AS | AM03230-SS | AD03763 | AM03884-AS | AM04729-SS |
| AD02006 | AM03150-AS | AM02540-SS | AD02428 | AM03274-AS | AM03231-SS | AD03764 | AM03884-AS | AM04806-SS |
| AD02007 | AM03150-AS | AM02941-SS | AD02429 | AM03274-AS | AM03232-SS | AD03765 | AM04501-AS | AM04611-SS |
| AD02008 | AM03150-AS | AM02942-SS | AD02430 | AM03274-AS | AM03233-SS | AD03766 | AM04501-AS | AM04808-SS |
| AD02009 | AM03151-AS | AM02540-SS | AD02431 | AM03274-AS | AM03234-SS | AD03767 | AM04501-AS | AM04809-SS |
| AD02010 | AM03151-AS | AM02941-SS | AD02432 | AM03274-AS | AM03235-SS | AD03768 | AM04501-AS | AM04810-SS |
| AD02011 | AM03151-AS | AM02942-SS | AD02433 | AM03274-AS | AM03236-SS | AD03769 | AM04501-AS | AM04811-SS |
| AD02075 | AM03255-AS | AM03220-SS | AD02434 | AM03274-AS | AM03237-SS | AD03770 | AM04501-AS | AM04812-SS |
| AD02076 | AM03255-AS | AM03221-SS | AD02435 | AM03255-AS | AM03238-SS | AD03771 | AM02860-AS | AM04813-SS |
| AD02077 | AM03255-AS | AM03222-SS | AD02436 | AM03256-AS | AM03238-SS | AD03801 | AM04821-AS | AM04816-SS |
| AD02078 | AM03255-AS | AM03223-SS | AD02437 | AM03255-AS | AM03240-SS | AD03802 | AM04822-AS | AM04817-SS |
| AD02079 | AM03255-AS | AM03224-SS | AD02438 | AM03256-AS | AM03240-SS | AD03803 | AM04823-AS | AM04816-SS |
| AD02080 | AM03255-AS | AM03225-SS | AD02439 | AM03255-AS | AM02942-SS | AD03804 | AM04821-AS | AM04835-SS |
| AD02081 | AM03255-AS | AM03226-SS | AD02440 | AM03256-AS | AM02942-SS | AD03805 | AM04824-AS | AM04819-SS |
| AD02082 | AM03255-AS | AM03227-SS | AD02462 | AM02857-AS | AM03330-SS | AD03806 | AM04824-AS | AM04820-SS |
| AD02083 | AM03255-AS | AM03228-SS | AD02463 | AM03331-AS | AM01223-SS | AD03841 | AM04871-AS | AM04862-SS |
| AD02084 | AM03255-AS | AM03229-SS | AD02464 | AM03107-AS | AM03291-SS | AD03842 | AM02860-AS | AM04863-SS |
| AD02085 | AM03255-AS | AM03230-SS | AD02465 | AM03279-AS | AM03291-SS | AD03843 | AM04872-AS | AM04138-SS |
| AD02086 | AM03255-AS | AM03231-SS | AD02466 | AM03280-AS | AM03291-SS | AD03844 | AM04539-AS | AM04864-SS |
| AD02087 | AM03255-AS | AM03232-SS | AD02467 | AM03281-AS | AM03291-SS | AD03845 | AM03300-AS | AM04865-SS |
| AD02088 | AM03255-AS | AM03233-SS | AD02468 | AM03282-AS | AM03291-SS | AD03846 | AM04873-AS | AM04412-SS |
| AD02089 | AM03255-AS | AM03234-SS | AD02469 | AM03283-AS | AM03291-SS | AD03847 | AM04874-AS | AM04866-SS |
| AD02090 | AM03255-AS | AM03235-SS | AD02470 | AM03284-AS | AM03291-SS | AD03848 | AM04874-AS | AM04867-SS |
| AD02091 | AM03255-AS | AM03236-SS | AD02471 | AM03300-AS | AM03291-SS | AD03849 | AM04875-AS | AM04867-SS |
| AD02092 | AM03255-AS | AM03237-SS | AD02472 | AM03301-AS | AM03291-SS | AD03850 | AM04876-AS | AM04866-SS |
| AD02093 | AM03256-AS | AM03220-SS | AD02473 | AM03107-AS | AM03292-SS | AD03851 | AM04877-AS | AM04866-SS |
| AD02094 | AM03256-AS | AM03221-SS | AD02474 | AM03279-AS | AM03292-SS | AD03852 | AM04877-AS | AM04867-SS |
| AD02095 | AM03256-AS | AM03222-SS | AD02475 | AM03280-AS | AM03292-SS | AD03853 | AM04874-AS | AM04868-SS |
| AD02096 | AM03256-AS | AM03223-SS | AD02476 | AM03281-AS | AM03292-SS | AD03854 | AM04874-AS | AM04869-SS |
| AD02097 | AM03256-AS | AM03224-SS | AD02477 | AM03282-AS | AM03292-SS | AD03855 | AM04875-AS | AM04869-SS |
| AD02098 | AM03256-AS | AM03225-SS | AD02478 | AM03283-AS | AM03292-SS | AD03856 | AM04874-AS | AM04870-SS |
| AD02099 | AM03256-AS | AM03226-SS | AD02479 | AM03284-AS | AM03292-SS | AD03857 | AM03972-AS | AM04808-SS |
| AD02100 | AM03256-AS | AM03227-SS | AD02480 | AM03300-AS | AM03292-SS | AD03858 | AM03972-AS | AM04811-SS |
| AD02101 | AM03256-AS | AM03228-SS | AD02481 | AM03301-AS | AM03292-SS | AD03859 | AM04822-AS | AM04819-SS |
| AD02102 | AM03256-AS | AM03229-SS | AD02482 | AM03107-AS | AM03293-SS | AD03860 | AM04878-AS | AM04819-SS |
| AD02103 | AM03256-AS | AM03230-SS | AD02483 | AM03279-AS | AM03293-SS | AD03861 | AM04878-AS | AM04820-SS |
| AD02104 | AM03256-AS | AM03231-SS | AD02484 | AM03280-AS | AM03293-SS | AD03862 | AM04879-AS | AM04138-SS |
| AD02105 | AM03256-AS | AM03232-SS | AD02485 | AM03281-AS | AM03293-SS | AD03863 | AM04879-AS | AM04863-SS |
| AD02106 | AM03256-AS | AM03233-SS | AD02486 | AM03282-AS | AM03293-SS | AD03864 | AM04880-AS | AM04138-SS |
| AD02107 | AM03256-AS | AM03234-SS | AD02487 | AM03283-AS | AM03293-SS | AD03920 | AM04969-AS | AM04138-SS |
| AD02108 | AM03256-AS | AM03235-SS | AD02488 | AM03284-AS | AM03293-SS | AD03921 | AM04970-AS | AM04412-SS |
| AD02109 | AM03256-AS | AM03236-SS | AD02489 | AM03300-AS | AM03293-SS | AD03922 | AM04971-AS | AM04867-SS |
| AD02110 | AM03256-AS | AM03237-SS | AD02490 | AM03301-AS | AM03293-SS | AD03923 | AM04971-AS | AM04869-SS |
| AD02111 | AM03257-AS | AM03220-SS | AD02491 | AM03107-AS | AM03294-SS | AD03924 | AM04972-AS | AM04820-SS |
| AD02112 | AM03257-AS | AM03221-SS | AD02492 | AM03279-AS | AM03294-SS | AD03925 | AM04972-AS | AM04819-SS |
| AD02113 | AM03257-AS | AM03222-SS | AD02493 | AM03280-AS | AM03294-SS | AD03931 | AM04979-AS | AM04978-SS |
| AD02114 | AM03257-AS | AM03223-SS | AD02494 | AM03281-AS | AM03294-SS | AD03932 | AM04979-AS | AM04811-SS |
| AD02115 | AM03257-AS | AM03224-SS | AD02495 | AM03282-AS | AM03294-SS | AD03933 | AM04979-AS | AM04869-SS |
| AD02116 | AM03257-AS | AM03225-SS | AD02496 | AM03283-AS | AM03294-SS | AD04017 | AM03300-AS | AM05070-SS |
| AD02117 | AM03257-AS | AM03226-SS | AD02497 | AM03284-AS | AM03294-SS | AD04018 | AM03972-AS | AM05072-SS |
| AD02118 | AM03257-AS | AM03227-SS | AD02498 | AM03300-AS | AM03294-SS | AD04017 | AM03300-AS | AM05070-SS |
| AD02119 | AM03257-AS | AM03228-SS | AD02499 | AM03301-AS | AM03294-SS | AD04018 | AM03972-AS | AM05072-SS |
| AD04170 | AM03972-AS | AM05341-SS | AD04171 | AM04877-AS | AM05342-SS | AD04110 | AM04875-AS | AM04866-SS |
| AD04263 | AM04879-AS | AM05489-SS | AD04272 | AM04979-AS | AM05499-SS | AD04281 | AM05496-AS | AM04412-SS |
| AD04264 | AM05490-AS | AM04416-SS | AD04273 | AM03972-AS | AM05494-SS | AD04282 | AM04874-AS | AM05503-SS |
| AD04265 | AM05490-AS | AM05491-SS | AD04274 | AM05498-AS | AM05494-SS | AD04283 | AM04874-AS | AM05502-SS |
| AD04266 | AM05492-AS | AM04496-SS | AD04275 | AM04979-AS | AM05494-SS | AD04284 | AM04874-AS | AM05506-SS |
| AD04267 | AM05493-AS | AM04496-SS | AD04276 | AM03972-AS | AM05501-SS | AD04285 | AM04877-AS | AM05503-SS |
| AD04268 | AM05498-AS | AM04496-SS | AD04277 | AM05498-AS | AM05501-SS | AD04286 | AM05497-AS | AM05502-SS |
| AD04269 | AM04979-AS | AM04496-SS | AD04278 | AM04979-AS | AM05501-SS | AD04287 | AM05497-AS | AM05506-SS |
| AD04270 | AM03972-AS | AM05499-SS | AD04279 | AM03300-AS | AM05500-SS | AD04288 | AM04874-AS | AM05504-SS |
| AD04271 | AM05498-AS | AM05499-SS | AD04280 | AM05495-AS | AM04412-SS | AD04289 | AM04874-AS | AM05505-SS |

TABLE 3B
LPA RNAi agent duplexes with Duplex ID numbers.

| | Antisense | Sense Strand |
|---|---|---|
| Duplex ID | Strand ID | ID |
| SD0001 | 1533-AS00 | 1533-SS00 |
| SD0002 | 1533-AS01 | 1533-SS00 |
| SD0003 | 1533-AS02 | 1533-SS00 |
| SD0004 | 1533-AS03 | 1533-SS00 |
| SD0005 | 1533-AS04 | 1533-SS00 |
| SD0006 | 1533-AS05 | 1533-SS00 |
| SD0007 | 1533-AS06 | 1533-SS00 |
| SD0008 | 1533-AS07 | 1533-SS00 |
| SD0009 | 1533-AS08 | 1533-SS00 |
| SD0010 | 1533-AS09 | 1533-SS00 |
| SD0011 | 1533-AS10 | 1533-SS00 |
| SD0012 | 1533-AS11 | 1533-SS00 |
| SD0013 | 1533-AS12 | 1533-SS00 |
| SD0014 | 1533-AS13 | 1533-SS00 |
| SD0015 | 1533-AS14 | 1533-SS00 |
| SD0016 | 1533-AS00 | 1533-SS01 |
| SD0017 | 1533-AS01 | 1533-SS01 |
| SD0018 | 1533-AS02 | 1533-SS01 |
| SD0019 | 1533-AS03 | 1533-SS01 |
| SD0020 | 1533-AS04 | 1533-SS01 |
| SD0021 | 1533-AS05 | 1533-SS01 |
| SD0022 | 1533-AS06 | 1533-SS01 |
| SD0023 | 1533-AS07 | 1533-SS01 |
| SD0024 | 1533-AS08 | 1533-SS01 |
| SD0025 | 1533-AS09 | 1533-SS01 |
| SD0026 | 1533-AS10 | 1533-SS01 |
| SD0027 | 1533-AS11 | 1533-SS01 |
| SD0028 | 1533-AS12 | 1533-SS01 |
| SD0029 | 1533-AS13 | 1533-SS01 |
| SD0030 | 1533-AS14 | 1533-SS01 |
| SD0031 | 1533-AS00 | 1533-SS02 |
| SD0032 | 1533-AS01 | 1533-SS02 |
| SD0033 | 1533-AS02 | 1533-SS02 |
| SD0034 | 1533-AS03 | 1533-SS02 |
| SD0035 | 1533-AS04 | 1533-SS02 |
| SD0036 | 1533-AS05 | 1533-SS02 |
| SD0037 | 1533-AS06 | 1533-SS02 |
| SD0038 | 1533-AS07 | 1533-SS02 |
| SD0039 | 1533-AS08 | 1533-SS02 |
| SD0040 | 1533-AS09 | 1533-SS02 |
| SD0041 | 1533-AS10 | 1533-SS02 |
| SD0042 | 1533-AS11 | 1533-SS02 |
| SD0043 | 1533-AS12 | 1533-SS02 |
| SD0044 | 1533-AS13 | 1533-SS02 |
| SD0045 | 1533-AS14 | 1533-SS02 |
| SD0046 | 1533-AS00 | 1533-SS03 |
| SD0047 | 1533-AS01 | 1533-SS03 |
| SD0048 | 1533-AS02 | 1533-SS03 |
| SD0049 | 1533-AS03 | 1533-SS03 |
| SD0050 | 1533-AS04 | 1533-SS03 |
| SD0051 | 1533-AS05 | 1533-SS03 |
| SD0052 | 1533-AS06 | 1533-SS03 |
| SD0053 | 1533-AS07 | 1533-SS03 |
| SD0054 | 1533-AS08 | 1533-SS03 |
| SD0055 | 1533-AS09 | 1533-SS03 |
| SD0056 | 1533-AS10 | 1533-SS03 |
| SD0057 | 1533-AS11 | 1533-SS03 |
| SD0058 | 1533-AS12 | 1533-SS03 |
| SD0059 | 1533-AS13 | 1533-SS03 |
| SD0060 | 1533-AS14 | 1533-SS03 |
| SD0061 | 1533-AS00 | 1533-SS04 |
| SD0062 | 1533-AS01 | 1533-SS04 |
| SD0063 | 1533-AS02 | 1533-SS04 |
| SD0064 | 1533-AS03 | 1533-SS04 |
| SD0065 | 1533-AS04 | 1533-SS04 |
| SD0066 | 1533-AS05 | 1533-SS04 |
| SD0067 | 1533-AS06 | 1533-SS04 |
| SD0068 | 1533-AS07 | 1533-SS04 |
| SD0069 | 1533-AS08 | 1533-SS04 |
| SD0070 | 1533-AS09 | 1533-SS04 |
| SD0071 | 1533-AS10 | 1533-SS04 |
| SD0072 | 1533-AS11 | 1533-SS04 |
| SD0073 | 1533-AS12 | 1533-SS04 |
| SD0074 | 1533-AS13 | 1533-SS04 |
| SD0075 | 1533-AS14 | 1533-SS04 |
| SD0076 | 1533-AS00 | 1533-SS05 |
| SD0077 | 1533-AS01 | 1533-SS05 |
| SD0078 | 1533-AS02 | 1533-SS05 |
| SD0079 | 1533-AS03 | 1533-SS05 |
| SD0080 | 1533-AS04 | 1533-SS05 |
| SD0081 | 1533-AS05 | 1533-SS05 |
| SD0082 | 1533-AS06 | 1533-SS05 |
| SD0083 | 1533-AS07 | 1533-SS05 |
| SD0084 | 1533-AS08 | 1533-SS05 |
| SD0085 | 1533-AS09 | 1533-SS05 |
| SD0086 | 1533-AS10 | 1533-SS05 |
| SD0087 | 1533-AS11 | 1533-SS05 |
| SD0088 | 1533-AS12 | 1533-SS05 |
| SD0089 | 1533-AS13 | 1533-SS05 |
| SD0090 | 1533-AS14 | 1533-SS05 |
| SD0091 | 1533-AS00 | 1533-SS06 |
| SD0092 | 1533-AS01 | 1533-SS06 |
| SD0093 | 1533-AS02 | 1533-SS06 |
| SD0094 | 1533-AS03 | 1533-SS06 |
| SD0095 | 1533-AS04 | 1533-SS06 |
| SD0096 | 1533-AS05 | 1533-SS06 |
| SD0097 | 1533-AS06 | 1533-SS06 |
| SD0098 | 1533-AS07 | 1533-SS06 |
| SD0099 | 1533-AS08 | 1533-SS06 |
| SD0100 | 1533-AS09 | 1533-SS06 |
| SD0101 | 1533-AS10 | 1533-SS06 |
| SD0102 | 1533-AS11 | 1533-SS06 |
| SD0103 | 1533-AS12 | 1533-SS06 |
| SD0104 | 1533-AS13 | 1533-SS06 |
| SD0105 | 1533-AS14 | 1533-SS06 |
| SD0106 | 1533-AS00 | 1533-SS07 |
| SD0107 | 1533-AS01 | 1533-SS07 |
| SD0108 | 1533-AS02 | 1533-SS07 |
| SD0109 | 1533-AS03 | 1533-SS07 |
| SD0110 | 1533-AS04 | 1533-SS07 |
| SD0111 | 1533-AS05 | 1533-SS07 |
| SD0112 | 1533-AS06 | 1533-SS07 |
| SD0113 | 1533-AS07 | 1533-SS07 |
| SD0114 | 1533-AS08 | 1533-SS07 |
| SD0115 | 1533-AS09 | 1533-SS07 |
| SD0116 | 1533-AS10 | 1533-SS07 |
| SD0117 | 1533-AS11 | 1533-SS07 |
| SD0118 | 1533-AS12 | 1533-SS07 |
| SD0119 | 1533-AS13 | 1533-SS07 |
| SD0120 | 1533-AS14 | 1533-SS07 |
| SD0121 | 1533-AS00 | 1533-SS08 |
| SD0122 | 1533-AS01 | 1533-SS08 |
| SD0123 | 1533-AS02 | 1533-SS08 |
| SD0124 | 1533-AS03 | 1533-SS08 |
| SD0125 | 1533-AS04 | 1533-SS08 |
| SD0126 | 1533-AS05 | 1533-SS08 |
| SD0127 | 1533-AS06 | 1533-SS08 |
| SD0128 | 1533-AS07 | 1533-SS08 |
| SD0129 | 1533-AS08 | 1533-SS08 |
| SD0130 | 1533-AS09 | 1533-SS08 |
| SD0131 | 1533-AS10 | 1533-SS08 |
| SD0132 | 1533-AS11 | 1533-SS08 |
| SD0133 | 1533-AS12 | 1533-SS08 |
| SD0134 | 1533-AS13 | 1533-SS08 |
| SD0135 | 1533-AS14 | 1533-SS08 |
| SD0136 | 1533-AS00 | 1533-SS09 |
| SD0137 | 1533-AS01 | 1533-SS09 |
| SD0138 | 1533-AS02 | 1533-SS09 |
| SD0139 | 1533-AS03 | 1533-SS09 |
| SD0140 | 1533-AS04 | 1533-SS09 |
| SD0141 | 1533-AS05 | 1533-SS09 |
| SD0142 | 1533-AS06 | 1533-SS09 |
| SD0143 | 1533-AS07 | 1533-SS09 |
| SD0144 | 1533-AS08 | 1533-SS09 |
| SD0145 | 1533-AS09 | 1533-SS09 |
| SD0146 | 1533-AS10 | 1533-SS09 |
| SD0147 | 1533-AS11 | 1533-SS09 |
| SD0148 | 1533-AS12 | 1533-SS09 |
| SD0149 | 1533-AS13 | 1533-SS09 |
| SD0150 | 1533-AS14 | 1533-SS09 |
| SD0151 | 1533-AS00 | 1533-SS01 |
| SD0152 | 1533-AS01 | 1533-SS01 |
| SD0153 | 1533-AS02 | 1533-SS01 |
| SD0154 | 1533-AS03 | 1533-SS01 |
| SD0155 | 1533-AS04 | 1533-SS01 |
| SD0156 | 1533-AS05 | 1533-SS01 |
| SD0157 | 1533-AS06 | 1533-SS01 |
| SD0158 | 1533-AS07 | 1533-SS01 |
| SD0159 | 1533-AS08 | 1533-SS01 |
| SD0160 | 1533-AS09 | 1533-SS01 |
| SD0161 | 1533-AS10 | 1533-SS01 |
| SD0162 | 1533-AS11 | 1533-SS01 |
| SD0163 | 1533-AS12 | 1533-SS01 |
| SD0164 | 1533-AS13 | 1533-SS01 |
| SD0165 | 1533-AS14 | 1533-SS01 |
| SD0166 | 1533-AS00 | 1533-SS01 |
| SD0167 | 1533-AS01 | 1533-SS01 |
| SD0168 | 1533-AS02 | 1533-SS01 |
| SD0169 | 1533-AS03 | 1533-SS01 |
| SD0170 | 1533-AS04 | 1533-SS01 |
| SD0171 | 1533-AS05 | 1533-SS01 |
| SD0172 | 1533-AS06 | 1533-SS01 |
| SD0173 | 1533-AS07 | 1533-SS01 |
| SD0174 | 1533-AS08 | 1533-SS01 |
| SD0175 | 1533-AS09 | 1533-SS01 |
| SD0176 | 1533-AS10 | 1533-SS01 |
| SD0177 | 1533-AS11 | 1533-SS01 |
| SD0178 | 1533-AS12 | 1533-SS01 |
| SD0179 | 1533-AS13 | 1533-SS01 |
| SD0180 | 1533-AS14 | 1533-SS01 |
| SD0181 | 1533-AS00 | 1533-SS02 |
| SD0182 | 1533-AS01 | 1533-SS02 |
| SD0183 | 1533-AS02 | 1533-SS02 |
| SD0184 | 1533-AS03 | 1533-SS02 |
| SD0185 | 1533-AS04 | 1533-SS02 |
| SD0186 | 1533-AS05 | 1533-SS02 |
| SD0187 | 1533-AS06 | 1533-SS02 |
| SD0188 | 1533-AS07 | 1533-SS02 |
| SD0189 | 1533-AS08 | 1533-SS02 |
| SD0190 | 1533-AS09 | 1533-SS02 |
| SD0191 | 1533-AS10 | 1533-SS02 |
| SD0192 | 1533-AS11 | 1533-SS02 |
| SD0193 | 1533-AS12 | 1533-SS02 |
| SD0194 | 1533-AS13 | 1533-SS02 |
| SD0195 | 1533-AS14 | 1533-SS02 |
| SD0196 | 1533-AS00 | 1533-CfinSS |
| SD0197 | 1533-AS01 | 1533-CfinSS |
| SD0198 | 1533-AS02 | 1533-CfinSS |
| SD0199 | 1533-AS03 | 1533-CfinSS |
| SD0200 | 1533-AS04 | 1533-CfinSS |
| SD0201 | 1533-AS05 | 1533-CfinSS |
| SD0202 | 1533-AS06 | 1533-CfinSS |
| SD0203 | 1533-AS07 | 1533-CfinSS |
| SD0204 | 1533-AS08 | 1533-CfinSS |
| SD0205 | 1533-AS09 | 1533-CfinSS |
| SD0206 | 1533-AS10 | 1533-CfinSS |
| SD0207 | 1533-AS11 | 1533-CfinSS |
| SD0208 | 1533-AS12 | 1533-CfinSS |
| SD0209 | 1533-AS13 | 1533-CfinSS |
| SD0210 | 1533-AS14 | 1533-CfinSS |
| SD0211 | 1533-CfinAS | 1533-SS00 |
| SD0212 | 1533-CfinAS | 1533-SS01 |
| SD0213 | 1533-CfinAS | 1533-SS02 |
| SD0214 | 1533-CfinAS | 1533-SS03 |
| SD0215 | 1533-CfinAS | 1533-SS04 |
| SD0216 | 1533-CfinAS | 1533-SS05 |
| SD0217 | 1533-CfinAS | 1533-SS06 |
| SD0218 | 1533-CfinAS | 1533-SS07 |
| SD0219 | 1533-CfinAS | 1533-SS08 |
| SD0220 | 1533-CfinAS | 1533-SS09 |
| SD0221 | 1533-CfinAS | 1533-SS10 |
| SD0222 | 1533-CfinAS | 1533-SS11 |
| SD0223 | 1533-CfinAS | 1533-SS12 |
| SD0224 | 1533-CfinAS | 1533-SS13 |
| SD0225 | 1533-CfinAS | 1533-SS14 |
| SD0226 | 1533-CfinAS | 1533-SS15 |
| SD0227 | 1533-CfinAS | 1533-SS16 |
| SD0228 | 1533-CfinAS | 1533-SS17 |
| SD0229 | 1533-CfinAS | 1533-SS18 |
| SD0230 | 1533-CfinAS | 1533-SS19 |
| SD0231 | 1533-CfinAS | 1533-SS20 |
| SD0232 | 1533-AS00 | 1533-SS12 |
| SD0233 | 1533-AS01 | 1533-SS12 |
| SD0234 | 1533-AS02 | 1533-SS12 |
| SD0235 | 1533-AS03 | 1533-SS12 |
| SD0236 | 1533-AS04 | 1533-SS12 |
| SD0237 | 1533-AS05 | 1533-SS12 |
| SD0238 | 1533-AS06 | 1533-SS12 |
| SD0239 | 1533-AS07 | 1533-SS12 |
| SD0240 | 1533-AS08 | 1533-SS12 |
| SD0241 | 1533-AS09 | 1533-SS12 |
| SD0242 | 1533-AS10 | 1533-SS12 |
| SD0243 | 1533-AS11 | 1533-SS12 |
| SD0244 | 1533-AS12 | 1533-SS12 |
| SD0245 | 1533-AS13 | 1533-SS12 |
| SD0246 | 1533-AS14 | 1533-SS12 |
| SD0247 | 1533-AS00 | 1533-SS13 |
| SD0248 | 1533-AS01 | 1533-SS13 |
| SD0249 | 1533-AS02 | 1533-SS13 |
| SD0250 | 1533-AS03 | 1533-SS13 |
| SD0251 | 1533-AS04 | 1533-SS13 |
| SD0252 | 1533-AS05 | 1533-SS13 |
| SD0253 | 1533-AS06 | 1533-SS13 |
| SD0254 | 1533-AS07 | 1533-SS13 |
| SD0255 | 1533-AS08 | 1533-SS13 |
| SD0256 | 1533-AS09 | 1533-SS13 |
| SD0257 | 1533-AS10 | 1533-SS13 |
| SD0258 | 1533-AS11 | 1533-SS13 |
| SD0259 | 1533-AS12 | 1533-SS13 |
| SD0260 | 1533-AS13 | 1533-SS13 |
| SD0261 | 1533-AS14 | 1533-SS13 |
| SD0262 | 1533-AS00 | 1533-SS14 |
| SD0263 | 1533-AS01 | 1533-SS14 |
| SD0264 | 1533-AS02 | 1533-SS14 |
| SD0265 | 1533-AS03 | 1533-SS14 |
| SD0266 | 1533-AS04 | 1533-SS14 |
| SD0267 | 1533-AS05 | 1533-SS14 |
| SD0268 | 1533-AS06 | 1533-SS14 |
| SD0269 | 1533-AS07 | 1533-SS14 |
| SD0270 | 1533-AS08 | 1533-SS14 |
| SD0271 | 1533-AS09 | 1533-SS14 |
| SD0272 | 1533-AS10 | 1533-SS14 |
| SD0273 | 1533-AS11 | 1533-SS14 |
| SD0274 | 1533-AS12 | 1533-SS14 |
| SD0275 | 1533-AS13 | 1533-SS14 |
| SD0276 | 1533-AS14 | 1533-SS14 |
| SD0277 | 1533-AS00 | 1533-SS15 |
| SD0278 | 1533-AS01 | 1533-SS15 |
| SD0279 | 1533-AS02 | 1533-SS15 |
| SD0280 | 1533-AS03 | 1533-SS15 |
| SD0281 | 1533-AS04 | 1533-SS15 |
| SD0282 | 1533-AS05 | 1533-SS15 |
| SD0283 | 1533-AS06 | 1533-SS15 |
| SD0284 | 1533-AS07 | 1533-SS15 |
| SD0285 | 1533-AS08 | 1533-SS15 |
| SD0286 | 1533-AS09 | 1533-SS15 |
| SD0287 | 1533-AS10 | 1533-SS15 |
| SD0288 | 1533-AS11 | 1533-SS15 |
| SD0289 | 1533-AS12 | 1533-SS15 |
| SD0290 | 1533-AS13 | 1533-SS15 |
| SD0291 | 1533-AS14 | 1533-SS15 |
| SD0292 | 1533-AS00 | 1533-SS16 |
| SD0293 | 1533-AS01 | 1533-SS16 |
| SD0294 | 1533-AS02 | 1533-SS16 |
| SD0295 | 1533-AS03 | 1533-SS16 |
| SD0296 | 1533-AS04 | 1533-SS16 |
| SD0297 | 1533-AS05 | 1533-SS16 |
| SD0298 | 1533-AS06 | 1533-SS16 |
| SD0299 | 1533-AS07 | 1533-SS16 |
| SD0300 | 1533-AS08 | 1533-SS16 |
| SD0301 | 1533-AS09 | 1533-SS16 |
| SD0302 | 1533-AS10 | 1533-SS16 |
| SD0303 | 1533-AS11 | 1533-SS16 |
| SD0304 | 1533-AS12 | 1533-SS16 |
| SD0305 | 1533-AS13 | 1533-SS16 |
| SD0306 | 1533-AS14 | 1533-SS16 |
| SD0307 | 1533-AS00 | 1533-SS17 |
| SD0308 | 1533-AS01 | 1533-SS17 |
| SD0309 | 1533-AS02 | 1533-SS17 |
| SD0310 | 1533-AS03 | 1533-SS17 |
| SD0311 | 1533-AS04 | 1533-SS17 |
| SD0312 | 1533-AS05 | 1533-SS17 |
| SD0313 | 1533-AS06 | 1533-SS17 |
| SD0314 | 1533-AS07 | 1533-SS17 |
| SD0315 | 1533-AS08 | 1533-SS17 |
| SD0316 | 1533-AS09 | 1533-SS17 |
| SD0317 | 1533-AS10 | 1533-SS17 |
| SD0318 | 1533-AS11 | 1533-SS17 |
| SD0319 | 1533-AS12 | 1533-SS17 |
| SD0320 | 1533-AS13 | 1533-SS17 |
| SD0321 | 1533-AS14 | 1533-SS17 |
| SD0322 | 1533-AS00 | 1533-SS18 |
| SD0323 | 1533-AS01 | 1533-SS18 |
| SD0324 | 1533-AS02 | 1533-SS18 |
| SD0325 | 1533-AS03 | 1533-SS18 |
| SD0326 | 1533-AS04 | 1533-SS18 |
| SD0327 | 1533-AS05 | 1533-SS18 |
| SD0328 | 1533-AS06 | 1533-SS18 |
| SD0329 | 1533-AS07 | 1533-SS18 |
| SD0330 | 1533-AS08 | 1533-SS18 |
| SD0331 | 1533-AS09 | 1533-SS18 |
| SD0332 | 1533-AS10 | 1533-SS18 |
| SD0333 | 1533-AS11 | 1533-SS18 |
| SD0334 | 1533-AS12 | 1533-SS18 |
| SD0335 | 1533-AS13 | 1533-SS18 |
| SD0336 | 1533-AS14 | 1533-SS18 |
| SD0337 | 1533-AS00 | 1533-SS19 |
| SD0338 | 1533-AS01 | 1533-SS19 |
| SD0339 | 1533-AS02 | 1533-SS19 |
| SD0340 | 1533-AS03 | 1533-SS19 |
| SD0341 | 1533-AS04 | 1533-SS19 |
| SD0342 | 1533-AS05 | 1533-SS19 |
| SD0343 | 1533-AS06 | 1533-SS19 |
| SD0344 | 1533-AS07 | 1533-SS19 |
| SD0345 | 1533-AS08 | 1533-SS19 |
| SD0346 | 1533-AS09 | 1533-SS19 |
| SD0347 | 1533-AS10 | 1533-SS19 |
| SD0348 | 1533-AS11 | 1533-SS19 |
| SD0349 | 1533-AS12 | 1533-SS19 |
| SD0350 | 1533-AS13 | 1533-SS19 |
| SD0351 | 1533-AS14 | 1533-SS19 |
| SD0352 | 1532-AS00 | 1532-SS00 |
| SD0353 | 1532-AS01 | 1532-SS00 |
| SD0354 | 1532-AS02 | 1532-SS00 |
| SD0355 | 1532-AS03 | 1532-SS00 |
| SD0356 | 1532-AS04 | 1532-SS00 |
| SD0357 | 1532-AS05 | 1532-SS00 |
| SD0358 | 1532-AS06 | 1532-SS00 |
| SD0359 | 1532-AS07 | 1532-SS00 |
| SD0360 | 1532-AS08 | 1532-SS00 |
| SD0361 | 1532-AS09 | 1532-SS00 |
| SD0362 | 1532-AS10 | 1532-SS00 |
| SD0363 | 1532-AS11 | 1532-SS00 |
| SD0364 | 1532-AS12 | 1532-SS00 |
| SD0365 | 1532-AS13 | 1532-SS00 |
| SD0366 | 1532-AS00 | 1532-SS01 |
| SD0367 | 1532-AS01 | 1532-SS01 |
| SD0368 | 1532-AS02 | 1532-SS01 |
| SD0369 | 1532-AS03 | 1532-SS01 |
| SD0370 | 1532-AS04 | 1532-SS01 |
| SD0371 | 1532-AS05 | 1532-SS01 |
| SD0372 | 1532-AS06 | 1532-SS01 |
| SD0373 | 1532-AS07 | 1532-SS01 |
| SD0374 | 1532-AS08 | 1532-SS01 |
| SD0375 | 1532-AS09 | 1532-SS01 |
| SD0376 | 1532-AS10 | 1532-SS01 |
| SD0377 | 1532-AS11 | 1532-SS01 |
| SD0378 | 1532-AS12 | 1532-SS01 |
| SD0379 | 1532-AS13 | 1532-SS01 |
| SD0380 | 1532-AS00 | 1532-SS02 |
| SD0381 | 1532-AS01 | 1532-SS02 |
| SD0382 | 1532-AS02 | 1532-SS02 |
| SD0383 | 1532-AS03 | 1532-SS02 |
| SD0384 | 1532-AS04 | 1532-SS02 |
| SD0385 | 1532-AS05 | 1532-SS02 |
| SD0386 | 1532-AS06 | 1532-SS02 |
| SD0387 | 1532-AS07 | 1532-SS02 |
| SD0388 | 1532-AS08 | 1532-SS02 |
| SD0389 | 1532-AS09 | 1532-SS02 |
| SD0390 | 1532-AS10 | 1532-SS02 |
| SD0391 | 1532-AS11 | 1532-SS02 |
| SD0392 | 1532-AS12 | 1532-SS02 |
| SD0393 | 1532-AS13 | 1532-SS02 |
| SD0394 | 1532-AS00 | 1532-SS03 |
| SD0395 | 1532-AS01 | 1532-SS03 |
| SD0396 | 1532-AS02 | 1532-SS03 |
| SD0397 | 1532-AS03 | 1532-SS03 |
| SD0398 | 1532-AS04 | 1532-SS03 |
| SD0399 | 1532-AS05 | 1532-SS03 |
| SD0400 | 1532-AS06 | 1532-SS03 |
| SD0401 | 1532-AS07 | 1532-SS03 |
| SD0402 | 1532-AS08 | 1532-SS03 |
| SD0403 | 1532-AS09 | 1532-SS03 |
| SD0404 | 1532-AS10 | 1532-SS03 |
| SD0405 | 1532-AS11 | 1532-SS03 |
| SD0406 | 1532-AS12 | 1532-SS03 |
| SD0407 | 1532-AS13 | 1532-SS03 |
| SD0408 | 1532-AS00 | 1532-SS04 |
| SD0409 | 1532-AS01 | 1532-SS04 |
| SD0410 | 1532-AS02 | 1532-SS04 |
| SD0411 | 1532-AS03 | 1532-SS04 |
| SD0412 | 1532-AS04 | 1532-SS04 |
| SD0413 | 1532-AS05 | 1532-SS04 |
| SD0414 | 1532-AS06 | 1532-SS04 |
| SD0415 | 1532-AS07 | 1532-SS04 |
| SD0416 | 1532-AS08 | 1532-SS04 |
| SD0417 | 1532-AS09 | 1532-SS04 |
| SD0418 | 1532-AS10 | 1532-SS04 |
| SD0419 | 1532-AS11 | 1532-SS04 |
| SD0420 | 1532-AS12 | 1532-SS04 |
| SD0421 | 1532-AS13 | 1532-SS04 |
| SD0422 | 1532-AS00 | 1532-SS05 |
| SD0423 | 1532-AS01 | 1532-SS05 |
| SD0424 | 1532-AS02 | 1532-SS05 |
| SD0425 | 1532-AS03 | 1532-SS05 |
| SD0426 | 1532-AS04 | 1532-SS05 |
| SD0427 | 1532-AS05 | 1532-SS05 |
| SD0428 | 1532-AS06 | 1532-SS05 |
| SD0429 | 1532-AS07 | 1532-SS05 |
| SD0430 | 1532-AS08 | 1532-SS05 |
| SD0431 | 1532-AS09 | 1532-SS05 |
| SD0432 | 1532-AS10 | 1532-SS05 |
| SD0433 | 1532-AS11 | 1532-SS05 |
| SD0434 | 1532-AS12 | 1532-SS05 |
| SD0435 | 1532-AS13 | 1532-SS05 |
| SD0436 | 1532-AS00 | 1532-SS06 |
| SD0437 | 1532-AS01 | 1532-SS06 |
| SD0438 | 1532-AS02 | 1532-SS06 |
| SD0439 | 1532-AS03 | 1532-SS06 |
| SD0440 | 1532-AS04 | 1532-SS06 |
| SD0441 | 1532-AS05 | 1532-SS06 |
| SD0442 | 1532-AS06 | 1532-SS06 |
| SD0443 | 1532-AS07 | 1532-SS06 |
| SD0444 | 1532-AS08 | 1532-SS06 |
| SD0445 | 1532-AS09 | 1532-SS06 |
| SD0446 | 1532-AS10 | 1532-SS06 |
| SD0447 | 1532-AS11 | 1532-SS06 |
| SD0448 | 1532-AS12 | 1532-SS06 |
| SD0449 | 1532-AS13 | 1532-SS06 |
| SD0450 | 1532-AS00 | 1532-SS07 |
| SD0451 | 1532-AS01 | 1532-SS07 |
| SD0452 | 1532-AS02 | 1532-SS07 |
| SD0453 | 1532-AS03 | 1532-SS07 |
| SD0454 | 1532-AS04 | 1532-SS07 |
| SD0455 | 1532-AS05 | 1532-SS07 |
| SD0456 | 1532-AS06 | 1532-SS07 |
| SD0457 | 1532-AS07 | 1532-SS07 |
| SD0458 | 1532-AS08 | 1532-SS07 |
| SD0459 | 1532-AS09 | 1532-SS07 |
| SD0460 | 1532-AS10 | 1532-SS07 |
| SD0461 | 1532-AS11 | 1532-SS07 |
| SD0462 | 1532-AS12 | 1532-SS07 |
| SD0463 | 1532-AS13 | 1532-SS07 |
| SD0464 | 1532-AS00 | 1532-SS08 |
| SD0465 | 1532-AS01 | 1532-SS08 |
| SD0466 | 1532-AS02 | 1532-SS08 |
| SD0467 | 1532-AS03 | 1532-SS08 |
| SD0468 | 1532-AS04 | 1532-SS08 |
| SD0469 | 1532-AS05 | 1532-SS08 |
| SD0470 | 1532-AS06 | 1532-SS08 |
| SD0471 | 1532-AS07 | 1532-SS08 |
| SD0472 | 1532-AS08 | 1532-SS08 |
| SD0473 | 1532-AS09 | 1532-SS08 |
| SD0474 | 1532-AS10 | 1532-SS08 |
| SD0475 | 1532-AS11 | 1532-SS08 |
| SD0476 | 1532-AS12 | 1532-SS08 |
| SD0477 | 1532-AS13 | 1532-SS08 |
| SD0478 | 1532-AS00 | 1532-SS09 |
| SD0479 | 1532-AS01 | 1532-SS09 |
| SD0480 | 1532-AS02 | 1532-SS09 |
| SD0481 | 1532-AS03 | 1532-SS09 |
| SD0482 | 1532-AS04 | 1532-SS09 |
| SD0483 | 1532-AS05 | 1532-SS09 |
| SD0484 | 1532-AS06 | 1532-SS09 |
| SD0485 | 1532-AS07 | 1532-SS09 |
| SD0486 | 1532-AS08 | 1532-SS09 |
| SD0487 | 1532-AS09 | 1532-SS09 |
| SD0488 | 1532-AS10 | 1532-SS09 |
| SD0489 | 1532-AS11 | 1532-SS09 |
| SD0490 | 1532-AS12 | 1532-SS09 |
| SD0491 | 1532-AS13 | 1532-SS09 |
| SD0492 | 1532-AS00 | 1532-SS10 |
| SD0493 | 1532-AS01 | 1532-SS10 |
| SD0494 | 1532-AS02 | 1532-SS10 |
| SD0495 | 1532-AS03 | 1532-SS10 |
| SD0496 | 1532-AS04 | 1532-SS10 |
| SD0497 | 1532-AS05 | 1532-SS10 |
| SD0498 | 1532-AS06 | 1532-SS10 |
| SD0499 | 1532-AS07 | 1532-SS10 |
| SD0500 | 1532-AS08 | 1532-SS10 |
| SD0501 | 1532-AS09 | 1532-SS10 |
| SD0502 | 1532-AS10 | 1532-SS10 |
| SD0503 | 1532-AS11 | 1532-SS10 |
| SD0504 | 1532-AS12 | 1532-SS10 |
| SD0505 | 1532-AS13 | 1532-SS10 |
| SD0506 | 1532-AS00 | 1532-SS11 |
| SD0507 | 1532-AS01 | 1532-SS11 |
| SD0508 | 1532-AS02 | 1532-SS11 |
| SD0509 | 1532-AS03 | 1532-SS11 |
| SD0510 | 1532-AS04 | 1532-SS11 |
| SD0511 | 1532-AS05 | 1532-SS11 |
| SD0512 | 1532-AS06 | 1532-SS11 |
| SD0513 | 1532-AS07 | 1532-SS11 |
| SD0514 | 1532-AS08 | 1532-SS11 |
| SD0515 | 1532-AS09 | 1532-SS11 |
| SD0516 | 1532-AS10 | 1532-SS11 |
| SD0517 | 1532-AS11 | 1532-SS11 |
| SD0518 | 1532-AS12 | 1532-SS11 |
| SD0519 | 1532-AS13 | 1532-SS11 |
| SD0520 | 1532-AS00 | 1532-SS12 |
| SD0521 | 1532-AS01 | 1532-SS12 |
| SD0522 | 1532-AS02 | 1532-SS12 |
| SD0523 | 1532-AS03 | 1532-SS12 |
| SD0524 | 1532-AS04 | 1532-SS12 |
| SD0525 | 1532-AS05 | 1532-SS12 |
| SD0526 | 1532-AS06 | 1532-SS12 |
| SD0527 | 1532-AS07 | 1532-SS12 |
| SD0528 | 1532-AS08 | 1532-SS12 |
| SD0529 | 1532-AS09 | 1532-SS12 |
| SD0530 | 1532-AS10 | 1532-SS12 |
| SD0531 | 1532-AS11 | 1532-SS12 |
| SD0532 | 1532-AS12 | 1532-SS12 |
| SD0533 | 1532-AS13 | 1532-SS12 |
| SD0534 | 1532-AS00 | 1532-SS13 |
| SD0535 | 1532-AS01 | 1532-SS13 |
| SD0536 | 1532-AS02 | 1532-SS13 |
| SD0537 | 1532-AS03 | 1532-SS13 |
| SD0538 | 1532-AS04 | 1532-SS13 |
| SD0539 | 1532-AS05 | 1532-SS13 |
| SD0540 | 1532-AS06 | 1532-SS13 |
| SD0541 | 1532-AS07 | 1532-SS13 |
| SD0542 | 1532-AS08 | 1532-SS13 |
| SD0543 | 1532-AS09 | 1532-SS13 |
| SD0544 | 1532-AS10 | 1532-SS13 |
| SD0545 | 1532-AS11 | 1532-SS13 |
| SD0546 | 1532-AS12 | 1532-SS13 |
| SD0547 | 1532-AS13 | 1532-SS13 |
| SD0548 | 1532-AS00 | 1532-SS14 |
| SD0549 | 1532-AS01 | 1532-SS14 |
| SD0550 | 1532-AS02 | 1532-SS14 |
| SD0551 | 1532-AS03 | 1532-SS14 |
| SD0552 | 1532-AS04 | 1532-SS14 |
| SD0553 | 1532-AS05 | 1532-SS14 |
| SD0554 | 1532-AS06 | 1532-SS14 |
| SD0555 | 1532-AS07 | 1532-SS14 |
| SD0556 | 1532-AS08 | 1532-SS14 |
| SD0557 | 1532-AS09 | 1532-SS14 |
| SD0558 | 1532-AS10 | 1532-SS14 |
| SD0559 | 1532-AS11 | 1532-SS14 |
| SD0560 | 1532-AS12 | 1532-SS14 |
| SD0561 | 1532-AS13 | 1532-SS14 |
| SD0562 | 1532-AS00 | 1532-SS15 |
| SD0563 | 1532-AS01 | 1532-SS15 |
| SD0564 | 1532-AS02 | 1532-SS15 |
| SD0565 | 1532-AS03 | 1532-SS15 |
| SD0566 | 1532-AS04 | 1532-SS15 |
| SD0567 | 1532-AS05 | 1532-SS15 |
| SD0568 | 1532-AS06 | 1532-SS15 |
| SD0569 | 1532-AS07 | 1532-SS15 |
| SD0570 | 1532-AS08 | 1532-SS15 |
| SD0571 | 1532-AS09 | 1532-SS15 |
| SD0572 | 1532-AS10 | 1532-SS15 |
| SD0573 | 1532-AS11 | 1532-SS15 |
| SD0574 | 1532-AS12 | 1532-SS15 |
| SD0575 | 1532-AS13 | 1532-SS15 |
| SD0576 | 1532-AS00 | 1532-SS16 |
| SD0577 | 1532-AS01 | 1532-SS16 |
| SD0578 | 1532-AS02 | 1532-SS16 |
| SD0579 | 1532-AS03 | 1532-SS16 |
| SD0580 | 1532-AS04 | 1532-SS16 |
| SD0581 | 1532-AS05 | 1532-SS16 |
| SD0582 | 1532-AS06 | 1532-SS16 |
| SD0583 | 1532-AS07 | 1532-SS16 |
| SD0584 | 1532-AS08 | 1532-SS16 |
| SD0585 | 1532-AS09 | 1532-SS16 |
| SD0586 | 1532-AS10 | 1532-SS16 |
| SD0587 | 1532-AS11 | 1532-SS16 |
| SD0588 | 1532-AS12 | 1532-SS16 |
| SD0589 | 1532-AS13 | 1532-SS16 |
| SD0590 | 1532-AS00 | 1532-SS17 |
| SD0591 | 1532-AS01 | 1532-SS17 |
| SD0592 | 1532-AS02 | 1532-SS17 |
| SD0593 | 1532-AS03 | 1532-SS17 |
| SD0594 | 1532-AS04 | 1532-SS17 |
| SD0595 | 1532-AS05 | 1532-SS17 |
| SD0596 | 1532-AS06 | 1532-SS17 |
| SD0597 | 1532-AS07 | 1532-SS17 |
| SD0598 | 1532-AS08 | 1532-SS17 |
| SD0599 | 1532-AS09 | 1532-SS17 |
| SD0600 | 1532-AS10 | 1532-SS17 |
| SD0601 | 1532-AS11 | 1532-SS17 |
| SD0602 | 1532-AS12 | 1532-SS17 |
| SD0603 | 1532-AS13 | 1532-SS17 |
| SD0604 | 1532-AS00 | 1532-SS18 |
| SD0605 | 1532-AS01 | 1532-SS18 |
| SD0606 | 1532-AS02 | 1532-SS18 |
| SD0607 | 1532-AS03 | 1532-SS18 |
| SD0608 | 1532-AS04 | 1532-SS18 |
| SD0609 | 1532-AS05 | 1532-SS18 |
| SD0610 | 1532-AS06 | 1532-SS18 |
| SD0611 | 1532-AS07 | 1532-SS18 |
| SD0612 | 1532-AS08 | 1532-SS18 |
| SD0613 | 1532-AS09 | 1532-SS18 |
| SD0614 | 1532-AS10 | 1532-SS18 |
| SD0615 | 1532-AS11 | 1532-SS18 |
| SD0616 | 1532-AS12 | 1532-SS18 |
| SD0617 | 1532-AS13 | 1532-SS18 |
| SD0618 | 1532-AS00 | 1532-SS19 |
| SD0619 | 1532-AS01 | 1532-SS19 |
| SD0620 | 1532-AS02 | 1532-SS19 |
| SD0621 | 1532-AS03 | 1532-SS19 |
| SD0622 | 1532-AS04 | 1532-SS19 |
| SD0623 | 1532-AS05 | 1532-SS19 |
| SD0624 | 1532-AS06 | 1532-SS19 |
| SD0625 | 1532-AS07 | 1532-SS19 |
| SD0626 | 1532-AS08 | 1532-SS19 |
| SD0627 | 1532-AS09 | 1532-SS19 |
| SD0628 | 1532-AS10 | 1532-SS19 |
| SD0629 | 1532-AS11 | 1532-SS19 |
| SD0630 | 1532-AS12 | 1532-SS19 |
| SD0631 | 1532-AS13 | 1532-SS19 |
| SD0632 | 1532-AS00 | 1532-SS20 |
| SD0633 | 1532-AS01 | 1532-SS20 |
| SD0634 | 1532-AS02 | 1532-SS20 |
| SD0635 | 1532-AS03 | 1532-SS20 |
| SD0636 | 1532-AS04 | 1532-SS20 |
| SD0637 | 1532-AS05 | 1532-SS20 |
| SD0638 | 1532-AS06 | 1532-SS20 |
| SD0639 | 1532-AS07 | 1532-SS20 |
| SD0640 | 1532-AS08 | 1532-SS20 |
| SD0641 | 1532-AS09 | 1532-SS20 |
| SD0642 | 1532-AS10 | 1532-SS20 |
| SD0643 | 1532-AS11 | 1532-SS20 |
| SD0644 | 1532-AS12 | 1532-SS20 |
| SD0645 | 1532-AS13 | 1532-SS20 |
| SD0646 | 1532-AS00 | 1532-SS21 |
| SD0647 | 1532-AS01 | 1532-SS21 |
| SD0648 | 1532-AS02 | 1532-SS21 |
| SD0649 | 1532-AS03 | 1532-SS21 |
| SD0650 | 1532-AS04 | 1532-SS21 |
| SD0651 | 1532-AS05 | 1532-SS21 |
| SD0652 | 1532-AS06 | 1532-SS21 |
| SD0653 | 1532-AS07 | 1532-SS21 |
| SD0654 | 1532-AS08 | 1532-SS21 |
| SD0655 | 1532-AS09 | 1532-SS21 |
| SD0656 | 1532-AS10 | 1532-SS21 |
| SD0657 | 1532-AS11 | 1532-SS21 |
| SD0658 | 1532-AS12 | 1532-SS21 |
| SD0659 | 1532-AS13 | 1532-SS21 |
| SD0660 | 1532-AS00 | 1532-SS22 |
| SD0661 | 1532-AS01 | 1532-SS22 |
| SD0662 | 1532-AS02 | 1532-SS22 |
| SD0663 | 1532-AS03 | 1532-SS22 |
| SD0664 | 1532-AS04 | 1532-SS22 |
| SD0665 | 1532-AS05 | 1532-SS22 |
| SD0666 | 1532-AS06 | 1532-SS22 |
| SD0667 | 1532-AS07 | 1532-SS22 |
| SD0668 | 1532-AS08 | 1532-SS22 |
| SD0669 | 1532-AS09 | 1532-SS22 |
| SD0670 | 1532-AS10 | 1532-SS22 |
| SD0671 | 1532-AS11 | 1532-SS22 |
| SD0672 | 1532-AS12 | 1532-SS22 |
| SD0673 | 1532-AS13 | 1532-SS22 |
| SD0674 | 1532-AS00 | 1532-SS23 |
| SD0675 | 1532-AS01 | 1532-SS23 |
| SD0676 | 1532-AS02 | 1532-SS23 |
| SD0677 | 1532-AS03 | 1532-SS23 |
| SD0678 | 1532-AS04 | 1532-SS23 |
| SD0679 | 1532-AS05 | 1532-SS23 |
| SD0680 | 1532-AS06 | 1532-SS23 |
| SD0681 | 1532-AS07 | 1532-SS23 |
| SD0682 | 1532-AS08 | 1532-SS23 |
| SD0683 | 1532-AS09 | 1532-SS23 |
| SD0684 | 1532-AS10 | 1532-SS23 |
| SD0685 | 1532-AS11 | 1532-SS23 |
| SD0686 | 1532-AS12 | 1532-SS23 |
| SD0687 | 1532-AS13 | 1532-SS23 |
| SD0688 | 1532-AS00 | 1532-SS24 |
| SD0689 | 1532-AS01 | 1532-SS24 |
| SD0690 | 1532-AS02 | 1532-SS24 |
| SD0691 | 1532-AS03 | 1532-SS24 |
| SD0692 | 1532-AS04 | 1532-SS24 |
| SD0693 | 1532-AS05 | 1532-SS24 |
| SD0694 | 1532-AS06 | 1532-SS24 |
| SD0695 | 1532-AS07 | 1532-SS24 |
| SD0696 | 1532-AS08 | 1532-SS24 |
| SD0697 | 1532-AS09 | 1532-SS24 |
| SD0698 | 1532-AS10 | 1532-SS24 |
| SD0699 | 1532-AS11 | 1532-SS24 |
| SD0700 | 1532-AS12 | 1532-SS24 |
| SD0701 | 1532-AS13 | 1532-SS24 |
| SD0702 | 1532-AS14 | 1532-SS00 |
| SD0703 | 1532-AS15 | 1532-SS00 |
| SD0704 | 1532-AS16 | 1532-SS00 |
| SD0705 | 1532-AS17 | 1532-SS00 |
| SD0706 | 1532-AS18 | 1532-SS00 |
| SD0707 | 1532-AS19 | 1532-SS00 |
| SD0708 | 1532-AS20 | 1532-SS00 |
| SD0709 | 1532-AS21 | 1532-SS00 |
| SD0710 | 1532-AS22 | 1532-SS00 |
| SD0711 | 1532-AS23 | 1532-SS00 |
| SD0712 | 1532-AS24 | 1532-SS00 |
| SD0713 | 1532-AS25 | 1532-SS00 |
| SD0714 | 1532-AS26 | 1532-SS00 |
| SD0715 | 1532-AS27 | 1532-SS00 |

[0074] In some embodiments, an LPA RNAi agent comprises an antisense strand comprising the nucleotide sequence of SEQ ID NO: 1242 (TCGUAUAACAAUAAGGGGC). In some embodiments, an LPA RNAi agent comprises an antisense strand comprising the nucleotide sequence of SEQ ID NO:1244 (UCGUAUAACAAUAAGGGG). In some embodiments, an LPA RNAi agent comprises an antisense strand comprising the nucleotide sequence of SEQ ID NO:1246 (UCGUAUAACAAUAAGGG). In some embodiments, an LPA RNAi agent comprises an antisense strand comprising the nucleotide sequence of SEQ ID NO:1248 (TGAGAAUGAGCCUCGAUAA). In some embodiments, an LPA RNAi agent comprises an antisense strand comprising the nucleotide sequence of SEQ ID NO:1250 (UGAGAAUGAGCCUCGAUA). In some embodiments, an LPA RNAi agent comprises an antisense strand comprising the nucleotide sequence of SEQ ID NO:1252 (UGAGAAUGAGCCUCGAU). In some embodiments, an LPA RNAi agent comprises an antisense strand comprising the nucleotide sequence of SEQ ID NO:1254 (UGUAUAACAAUAAGGGG). In some embodiments, an LPA RNAi agent comprises an antisense strand comprising the nucleotide sequence of SEQ ID NO:1280 (CGUAUAACAAUAAGGGGC). In some embodiments, an LPA RNAi agent comprises an antisense strand comprising the nucleotide sequence of SEQ ID NO:1281 (GAGAAUGAGCCUCGAUAA). In some embodiments, an LPA RNAi agent comprises an antisense strand comprising the nucleotide sequence of SEQ ID NO:1282 (UCGUAUAACAAUAAGGGGC). In some embodiments, an LPA RNAi agent comprises an antisense strand comprising the nucleotide sequence of SEQ ID NO:1283 (UGAGAAUGAGCCUCGAUAA). In some embodiments, one or more of the nucleotides is modified.

[0075] In some embodiments, an LPA RNAi agent comprises a sense strand comprising the nucleotide sequence of SEQ ID NO: 1243 (GCCCCUUAUUGUUAUACGA). In some embodiments, an LPA RNAi agent comprises a sense strand comprising the nucleotide sequence of SEQ ID NO:1245 (CCCCUUAUUGUUAUACGA). In some embodiments, an LPA RNAi agent comprises a sense strand comprising the nucleotide sequence of SEQ ID NO: 1247 (CCCUUAUUGUUAUACGA). In some embodiments, an LPA RNAi agent comprises a sense strand comprising the nucleotide sequence of SEQ ID NO:1249 (UUAUCGAGGCUCAUUCUCA). In some embodiments, an LPA RNAi agent comprises a sense strand comprising the nucleotide sequence of SEQ ID NO:1251 (UAUCGAGGCUCAUUCUCA). In some embodiments, an LPA RNAi agent comprises a sense strand comprising the nucleotide sequence of SEQ ID NO:1253 (AUCGAGGCUCAUUCUCA). In some embodiments, an LPA RNAi agent comprises a sense strand comprising the nucleotide sequence of SEQ ID NO:1255 (CCCCUUAUUGUUAUACA). In some embodiments, an LPA RNAi agent comprises a sense strand comprising the nucleotide sequence of SEQ ID NO:1284 (GCCCCUUAUUGUUAUACG). In some embodiments, an LPA RNAi agent comprises a sense strand comprising the nucleotide sequence of SEQ ID NO:1285 (UUAUCGAGGCUCAUUCUC). In some embodiments, one or more of the nucleotides is modified.

[0076] In some embodiments, an LPA RNAi agent comprises an antisense strand comprising the nucleotide sequence of SEQ ID NO:1242 and a sense strand comprising the nucleotide sequence of SEQ ID NO:1243. In some embodiments, an LPA RNAi agent comprises an antisense strand comprising the nucleotide sequence of SEQ ID NO:1244 and a sense strand comprising the nucleotide sequence of SEQ ID NO:1245. In some embodiments, an LPA RNAi agent comprises an antisense strand comprising the nucleotide sequence of SEQ ID NO:1246 and a sense strand comprising the nucleotide sequence of SEQ ID NO:1247. In some embodiments, an LPA RNAi agent comprises an antisense strand comprising the nucleotide sequence of SEQ ID NO:1248 and a sense strand comprising the nucleotide sequence of SEQ ID NO:1249. In some embodiments, an LPA RNAi agent comprises an antisense strand comprising the nucleotide sequence of SEQ ID NO: 1250 and a sense strand comprising the nucleotide sequence of SEQ ID NO:1251. In some embodiments, an LPA RNAi agent comprises an antisense strand comprising the nucleotide sequence of SEQ ID NO:1252 and a sense strand comprising the nucleotide sequence of SEQ ID NO:1253. In some embodiments, an LPA RNAi agent comprises an antisense strand comprising the nucleotide sequence of SEQ ID NO:1254 and sense strand comprising the nucleotide sequence of SEQ ID NO:1255. In some embodiments, an LPA RNAi agent comprises an antisense strand comprising the nucleotide sequence of SEQ ID NO:1280 and a sense strand comprising the nucleotide sequence of SEQ ID NO:1284. In some embodiments, an LPA RNAi agent comprises an antisense strand comprising the nucleotide sequence of SEQ ID NO:1281 and a sense strand comprising the nucleotide sequence of SEQ ID NO: 1285. In some embodiments, an LPA RNAi agent comprises an antisense strand comprising the nucleotide sequence of SEQ ID NO:1282 and a sense strand comprising the nucleotide sequence of SEQ ID NO:1259. In some embodiments, an LPA RNAi agent comprises an antisense strand comprising the nucleotide sequence of SEQ ID NO:1283 and a sense strand comprising the nucleotide sequence of SEQ ID NO: 1249. In some embodiments, one or more of the nucleotides is modified.

[0077] In some embodiments, an LPA RNAi agent comprises an antisense strand comprising the nucleotide sequence of SEQ ID NO. 156, 164, or 188. In some embodiments, an LPA RNAi agent comprises a sense strand comprising the nucleotide sequence of SEQ ID NO. 310, 357, 384, or 376. In some embodiments, an LPA RNAi agent comprises an antisense strand and a sense strand comprising the nucleotide sequences of SEQ ID NOs:156/310, SEQ ID NOs:164/357, SEQ ID NOs:188/384, SEQ ID NOs:164/376, or SEQ ID NOs:164/384. In some embodiments, one or more of the nucleotides is modified.

[0078] In some embodiments, an LPA RNAi agent comprises an antisense strand comprising the nucleotide sequence of SEQ ID NO. 637, 709, 790, 787, or 788. In some embodiments, an LPA RNAi agent comprises a sense strand comprising the nucleotide sequence of SEQ ID NO:1132, 1135, 1189, 1191, or 1186. In some embodiments, an LPA RNAi agent comprises an antisense strand and a sense strand comprising the nucleotide sequences of SEQ ID NOs:637/1132, SEQ ID NOs:709/1135, SEQ ID NOs:790/1189, SEQ ID NOs:787/1191, or SEQ ID NOs:788/1186.

[0079] In some embodiments, an LPA RNAi agent comprises SEQ ID NO. 637, 709, 790, 787, or 788. In some embodiments, an LPA RNAi agent comprises SEQ ID NO:1132, 1135, 1189, 1191, or 1186. In some embodiments, an LPA RNAi agent comprises SEQ ID NOs:637/1132, SEQ ID NOs:709/1135, SEQ ID NOs:790/1189, SEQ ID NOs:787/1191, or SEQ ID NOs:788/1186.

[0080] In some embodiments, an LPA RNAi agent consists of SEQ ID NO. 637, 709, 790, 787, or 788. In some embodiments, an LPA RNAi agent consists of SEQ ID NO:1132, 1135, 1189, 1191, or 1186. In some embodiments, an LPA RNAi agent consists of SEQ ID NOs:637/1132, SEQ ID NOs:709/1135, SEQ ID NOs:790/1189, SEQ ID NOs:787/1191, or SEQ ID NOs:788/1186.

[0081] In some embodiments, an LPA RNAi agent comprises an antisense strand and a sense strand having the nucleotide sequences of any of the antisense strand/sense strand duplexes of Table 3A or 3B.

[0082] In some embodiments, an LPA RNAi agent comprises an antisense strand and a sense strand having the nucleotide sequences of any of the antisense strand/sense strand duplexes of Table 3A or 3B, and further comprises an asialoglycoprotein receptor ligand targeting group.

[0083] In some embodiments, an LPA RNAi agent comprises an antisense strand and a sense strand having the nucleotide sequences of any of the antisense strand/sense strand duplexes of Table 3A or 3B, and further comprises a targeting group selected from the group consisting of (C11¬PEG3¬NAG3), (C11-PEG3-NAG3), (C6-PEG4-NAG3), (NAG 3), (NAG4), (NAG3¬AA2), (NAG3-Palm), (NAG13), (NAG18), (NAG24), (NAG25), (NAG25)s, (NAG26), (NAG27), (NAG28), (NAG29), (NAG30), (NAG30)s, (NAG31), (NAG13), (NAG31s), (NAG32), (NAG33), (NAG34), (NAG35), (NAG36), and (NAG37).

[0084] In some embodiments, an LPA RNAi agent comprises an antisense strand and a sense strand having the modified nucleotide sequences of any of the antisense strand/sense strand duplexes of Table 3A or 3B.

[0085] In some embodiments, an LPA RNAi agent comprises an antisense strand and a sense strand having the modified nucleotide sequences of any of the antisense strand/sense strand duplexes of Table 3A or 3B, and further comprises an asialoglycoprotein receptor ligand targeting group.

[0086] In some embodiments, an LPA RNAi agent comprises an antisense strand and a sense strand having the modified nucleotide sequences of any of the antisense strand/sense strand duplexes of Table 3A or 3B, and further comprises a targeting group selected from the group consisting of (C11-PEG3-NAG3), (C11-PEG3-NAG3), (C6-PEG4-NAG3), (NAG 3), (NAG4), (NAG3-AA2), (NAG3-Palm), (NAG13), (NAG18), (NAG24), (NAG25), (NAG25)s, (NAG26), (NAG27), (NAG28), (NAG29), (NAG30), (NAG30)s, (NAG31), (NAG13), (NAG31s), (NAG32), (NAG33), (NAG34), (NAG35), (NAG36), and (NAG37).

[0087] In some embodiments, an LPA RNAi agent comprises any of the duplexes of Table 3A or 3B.

[0088] In some embodiments, an LPA RNAi agent consists of any of the duplexes of Table 3A or 3B.

[0089] In some embodiments, an LPA RNAi agent comprises an antisense strand and a sense strand having the nucleotide sequences AD03460, AD03536, AD03851, AD03853, AD3847, or AD04110.

[0090] In some embodiments, an LPA RNAi agent comprises an antisense strand and a sense strand having the nucleotide sequences AD03460, AD03536, AD03851, AD03853, AD3847, or AD04110, and further comprises an asialoglycoprotein receptor ligand targeting group.

[0091] In some embodiments, an LPA RNAi agent comprises an antisense strand and a sense strand having the nucleotide sequences AD03460, AD03536, AD03851, AD03853, AD3847, or AD04110, and further comprises a targeting group selected from the group consisting of (C11-PEG3-NAG3), (C11-PEG3-NAG3), (C6-PEG4-NAG3), (NAG 3), (NAG4), (NAG3-AA2), (NAG3-Palm), (NAG13), (NAG18), (NAG24), (NAG25), (NAG25)s, (NAG26), (NAG27), (NAG28), (NAG29), (NAG30), (NAG30)s, (NAG31), (NAG13), (NAG31s), (NAG32), (NAG33), (NAG34), (NAG35), (NAG36), and (NAG37).

[0092] In some embodiments, an LPA RNAi agent comprises an antisense strand and a sense strand having the modified nucleotide sequences AD03460, AD03536, AD03851, AD03853, AD3847, or AD04110.

[0093] In some embodiments, an LPA RNAi agent comprises an antisense strand and a sense strand having the modified nucleotide sequences AD03460, AD03536, AD03851, AD03853, AD3847, or AD04110, and further comprises an asialoglycoprotein receptor ligand targeting group.

[0094] In some embodiments, an LPA RNAi agent comprises an antisense strand and a sense strand having the modified nucleotide sequences AD03460, AD03536, AD03851, AD03853, AD3847, or AD04110, and further comprises a targeting group selected from the group consisting of (C11-PEG3-NAG3), (C11-PEG3-NAG3), (C6-PEG4-NAG3), (NAG3), (NAG4), (NAG3-AA2), (NAG3-Palm), (NAG13), (NAG18), (NAG24), (NAG25), (NAG25)s, (NAG26), (NAG27), (NAG28), (NAG29), (NAG30), (NAG30)s, (NAG31), (NAG13), (NAG31s), (NAG32), (NAG33), (NAG34), (NAG35), (NAG36), and (NAG37).

[0095] In some embodiments, an LPA RNAi agent comprises AD03460, AD03536, AD03851, AD03853, AD3847, or AD04110.

[0096] In some embodiments, an LPA RNAi agent consists of AD03460, AD03536, AD03851, AD03853, AD3847, or AD04110.

### Non-Nucleotide Group

[0097] In some embodiments, an LPA RNAi agent contains or is conjugated to one or more non-nucleotide groups including, but not limited to a targeting group, linking group, delivery polymer, or a delivery vehicle. The non-nucleotide group can enhance targeting, delivery or attachment of the RNAi agent. Examples of targeting groups and linking groups are provided in Table 4. The non-nucleotide group can be covalently linked to the 3′ and/or 5′ end of either the sense strand and/or the antisense strand. In some embodiments, an LPA RNAi agent contains a non-nucleotide group linked to the 3′ and/or 5′ end of the sense strand. In some embodiments a non-nucleotide group is linked to the 5′ end of an LPA RNAi agent sense strand. A non-nucleotide group may linked directly or indirectly to the RNAi agent via a linker/linking group. In some embodiments a non-nucleotide group is linked to the RNAi agent via a labile, cleavable, or reversible bond or linker.

[0098] In some embodiments, a non-nucleotide group enhances the pharmacokinetic or biodistribution properties of an RNAi agent or conjugate to which it is attached to improve cell- or tissue-specific distribution and cell-specific uptake of the conjugate. In some embodiments, a non-nucleotide group enhances endocytosis of the RNAi agent.

### Targeting Group

[0099] A targeting group can be monovalent, divalent, trivalent, tetravalent, or have higher valency. Representative targeting groups include, without limitation, compounds with affinity to cell surface molecule, cell receptor ligands, hapten, antibodies, monoclonal antibodies, antibody fragments, and antibody mimics with affinity to cell surface molecules. In some embodiments, a targeting group is linked to an RNAi agent using a linker, such as a PEG linker or one, two, or three abasic and/or ribitol groups. In some embodiments, a targeting group comprises a galactose cluster.

[0100] The LPA RNAi agents described herein may be synthesized having a reactive group, such as an amine group, at the 5′-terminus. The reactive group may be used to subsequently attach a targeting moiety using methods typical in the art.

[0101] In some embodiments, a targeting group comprises an asialoglycoprotein receptor ligand. In some embodiments, an asialoglycoprotein receptor ligand includes or consists of one or more galactose derivatives or galactose clusters. As used herein, the term galactose derivative includes both galactose and derivatives of galactose having affinity for the asialoglycoprotein receptor that is equal to or greater than that of galactose. Galactose derivatives include, but are not limited to: galactose, galactosamine, N-formylgalactosamine, N-acetyl-galactosamine, N-propionyl-galactosamine, N-n-butanoyl-galactosamine, and N-iso-butanoylgalactos-amine (see for example: Iobst, S. T. and Drickamer, K. J.B.C. 1996, 271, 6686). Galactose derivatives and galactose clusters that are useful for in vivo targeting of oligonucleotides and other molecules to the liver are known in the art (see, for example, Baenziger and Fiete, 1980, Cell, 22, 611-620; Connolly et al., 1982, J. Biol. Chem., 257, 939-945). Galactose derivatives have been used to target molecules to hepatocytes in vivo through their binding to the asialoglycoprotein receptor (ASGPr) expressed on the surface of hepatocytes. Binding of ASGPr ligands to the ASGPr(s) facilitates cell-specific targeting to hepatocytes and endocytosis of the molecule into hepatocytes. The galactose cluster may be attached to the 3′ or 5′ end of the RNAi polynucleotide using methods known in the art.

[0102] As used herein, a galactose cluster comprises a molecule having two to four terminal galactose derivatives. A terminal galactose derivative is attached to a molecule through its C-1 carbon. In some embodiments, the galactose cluster is a galactose derivative trimer, tri-antennary galactose derivative, or tri-valent galactose derivative. In some embodiments, the galactose cluster is comprises N-acetylgalactosamines (GalNAc). In some embodiments, the galactose cluster comprises a tri-valent N-acetyl-galactosamine. In some embodiments, the galactose cluster is a galactose derivative tetramer, tetra-antennary galactose derivative, or tetra-valent galactose derivative. In some embodiments, the galactose cluster comprises a tetra-valent N-acetyl-galactosamine.

[0103] As used herein, a galactose trimer contains three galactose derivatives, each linked to a central branch point. As used herein, a galactose derivative tetramer contains four galactose derivatives, each linked to a central branch point. The galactose derivatives can be attached to the central branch point through the C-1 carbons of the saccharides. In some embodiments, the galactose derivatives are linked to the branch point via linkers or spacers. In some embodiments, the linker or spacer is a flexible hydrophilic spacer, such as a PEG group (see, for example, U.S. Pat. No. 5,885,968; Biessen et al. J. Med. Chem. 1995 Vol. 39 p. 1538-1546). In some embodiments, the PEG spacer is a PEG3 spacer. The branch point can be any small molecule which permits attachment of the three galactose derivatives and further permits attachment of the branch point to the RNAi agent. An example of branch point group is a di-lysine or di-glutamate. Attachment of the branch point to the RNAi agent can occur through a linker or spacer. In some embodiments, the linker or spacer comprises a flexible hydrophilic spacer, such as, but not limited to: a PEG spacer. In some embodiments, a PEG spacer is a PEG₃ spacer (three ethylene units). In other embodiments, the PEG spacer has 1 to 20 ethylene units (PEG₁ to PEG₂₀). In some embodiments, a galactose derivative comprises an N-acetylgalactosamine (GalNAc or NAG). In some embodiments, the galactose cluster is comprised of a galactose derivative tetramer, which can be, for example, an N-acetyl-galactosamine tetramer.

[0104] In some embodiments, pharmaceutical compositions for delivering an LPA RNAi agent to a liver cell in vivo are described. Such pharmaceutical compositions can include, for example, an LPA RNAi agent conjugated to a galactose cluster. In some embodiments, the galactose cluster is comprised of a galactose derivative trimer, which can be, for example, an N-acetyl-galactosamine trimer, or galactose derivative tetramer, which can be, for example, an N-acetyl-galactosamine tetramer.

[0105] Targeting groups include, but are not limited to, (Chol-TEG), (TEG-Chol), (C11-PEG3-NAG3), (Cₘ-PEGₙ-NAG3), (Cₓ-PEG_{z}-NAG3), (NAG 3), (NAG4), (NAG3-AA2), (NAG3-Palm), (NAG13), (NAG18), (NAG24), (NAG25), (NAG25)s, (NAG26), (NAG27), (NAG28), (NAG29), (NAG30), (NAG30)s, (NAG31), (NAG13), (NAG31s), (NAG32), (NAG33), (NAG34), (NAG35), (NAG36), and (NAG37).

### Linking Group

[0106] In some embodiments, a linking group is conjugated to the RNAi agent. The linking group facilitates covalent linkage of the agent to a targeting group or delivery polymer or delivery vehicle. The linking group can be linked to the 3′ or the 5′ end of the RNAi agent sense strand or antisense strand. In some embodiments, the linking group is linked to the RNAi agent sense strand. In some embodiments, the linking group is conjugated to the 5′ or 3′ end of an RNAi agent sense strand. In some embodiments a linking group is conjugated to the 5′ end of an RNAi agent sense strand. Examples of linking groups, include, but are not limited to: Alk-SMPT-C6, Alk-SS-C6, DBCO-TEG, Me-Alk-SS-C6, and C6-SS-Alk-Me, reactive groups such a primary amines and alkynes, alkyl groups, abasic ribose, ribitol, and/or PEG groups.

[0107] A linker or linking group is a connection between two atoms that links one chemical group (such as an RNAi agent) or segment of interest to another chemical group (such as a targeting group or delivery polymer) or segment of interest via one or more covalent bonds. A labile linkage contains a labile bond. A linkage may optionally include a spacer that increases the distance between the two joined atoms. A spacer may further add flexibility and/or length to the linkage. Spacers may include, but are not be limited to, alkyl groups, alkenyl groups, alkynyl groups, aryl groups, aralkyl groups, aralkenyl groups, and aralkynyl groups; each of which can contain one or more heteroatoms, heterocycles, amino acids, nucleotides, and saccharides. Spacer groups are well known in the art and the preceding list is not meant to limit the scope of the description.

[0108] Linking groups include, but are not limited to, Alkyl, PEG, (C6-PEGₙ-Alk), (Cₙ-SMPT-Alk), and (Cₙ-SS-Alk-Me).

[0109] Any of the LPA RNAi agents listed in Tables 2A and 2B which contains a 3′ or 5′ targeting group or linking group, may alternatively contain no 3′ or 5′ targeting group or linking group, or may contain a different 3′ or 5′ targeting group or linking group including, but not limited to, those depicted in Table 4. Any of the LPA RNAi agent nucleotide sequences listed in Tables 1, 2A and 2B, whether modified or unmodified, may contain 3′ or 5′ targeting group or linking group, including, but not limited to, those depicted in Table 4. Any of the LPA RNAi agent duplexes listed in Tables 3A and 3B, whether modified or unmodified, may further comprise a targeting group or linking group, including, but not limited to, those depicted in Table 4, and the targeting group or linking group may be attached to the 3′ or 5′ terminus of either the sense strand or the antisense strand of the LPA RNAi agent duplex.

```
TABLE 4
Structures representing various modified nucleotides, targeting groups, and linking
groups.
  vpdT
  5Me-Gf
  CPrpTM
  (cPrp)u
  epTM
  epTcPr
  (PAZ)
  (Alk-PEGₙ-C6) pr (C6-PEGₙ-Alk), wherein n = 1 = 12 In some embodiments, n = 5 (e.g.., (Alk-PEG-5-C6)).
  (Cₙ-SMPT-Alk) or (Alk-SMPT-Cₙ), wherein n = 1-10, In some embodiments, n = 4 (e.g., (C6-SMPT-Alk)).
  (Cₙ-SS-Alk-Me) or ((Me-Alk-SS-Cₙ); wherein n = 1-10 In some embodiments, n = 4 (e.g., (C6-SS-Alk-Me)).
  (Stearyl)
  (Chol-TEG), wherein n = 1-10 In some embodiments. n = 2.
  (TEG-Chol), wherein n = 1-10 In some embodiments. n = 3.
  (NAG3-PEGₙ-Cₘ) or (Cₘ-PEGₙ-NAG3), wherein n = 1-6 and m = 1-12 In some embodiments, n = 3 and m = 9 (e.g., (C11-PEG3-NAG3))
  (Cₓ-PEG_{z}-NAG3), wherein x = 1-10, y = 1-10, and z = 1-10 In some embodiments, x = 3, y = 3, and z = 4 (C6-PEG4-NAG3)
  (NAG 3)
  (NAG4)
  (NAG3-AA2)
  (NAG3-Palm)
  (NAG13)
  (NAG18)
  (NAG24)
  (NAG25)
  (NAG25)s
  (NAG26)
  (NAG27)
  (NAG28)
  (NAG29)
  (NAG30)
  (NAG30)s)
  (NAG31)
  (NAG31)s
  (NAG32)
  (NAG33)
  (NAG34)
  (NAG35)
  (NAG36)
  (NAG37)
```

[0110] In each of the above structures, NAG comprises an N-Acetyl-Galactosamine or another ASGPR ligand. Each (NAGx) may be attached to an LPA RNAi agent via a phosphate group (as in (NAG25), (NAG30), and (NAG31)), or a phosphorothioate group, (as is (NAG25)s, (NAG30)s, and (NAG31)s), or another linking group. Alternatively, other linking groups known in the art may be used.

### Delivery Vehicles

[0111] In some embodiments, a delivery vehicle may be used to deliver an RNAi agent to a cell or tissue. A delivery vehicle is a compound that improves delivery of the RNAi agent to a cell or tissue. A delivery vehicle can include, or consist of, but is not limited to: a polymer, such as an amphipathic polymer, a membrane active polymer, a peptide, a melittin peptide, a melittin-like peptide (MLP), a lipid, a reversibly modified polymer or peptide, or a reversibly modified membrane active polyamine.

[0112] In some embodiments, the RNAi agents can be combined with lipids, nanoparticles, polymers, liposomes, micelles, DPCs or other delivery systems available in the art. The RNAi agents can also be chemically conjugated to targeting groups, lipids (including, but not limited to cholesterol and cholesteryl derivatives), nanoparticles, polymers, liposomes, micelles, DPCs (see, for example WO 2000/053722, WO 2008/0022309, WO 2011/104169, and WO 2012/083185, WO 2013/032829, WO 2013/158141, each of which is incorporated herein by reference), or other delivery systems available in the art.

### Pharmaceutical Compositions

[0113] Described herein are methods for delivering LPA RNAi agents to liver cells in a mammal in vivo. In some embodiments, a delivery vehicle may be used. A delivery vehicle is a compound which improves delivery of the RNAi agent to the cell. A delivery vehicle can be, but is not limited to: a polymer, such as an amphipathic polymer, membrane active polymer, a peptide, such as a melittin or melittin-like peptide, a reversibly modified polymer or peptide, or a lipid. In some embodiments, an LPA RNAi agent is linked to a targeting ligand that comprises an asialoglycoprotein ligand. In some embodiments, an LPA RNAi agent is linked to a targeting ligand that comprises or consists of a galactose cluster.

[0114] An LPA RNAi agent can be used to inhibit expression of LPA in a cell, group of cells, or a tissue, e.g., in a subject. In some embodiments, an LPA RNAi agent is used to formulate a composition, i.e. a pharmaceutical composition or medicament, for administering to a subject. As used herein, a pharmaceutical composition or medicament comprises a pharmacologically effective amount of at least one of the described LPA RNAi agents and one or more pharmaceutically acceptable excipients. Pharmaceutically acceptable excipients (excipients) are substances other than the Active Pharmaceutical ingredient (API, therapeutic product, e.g., LPA RNAi agent) that have been appropriately evaluated for safety and are intentionally included in the drug delivery system. Excipients do not exert or are not intended to exert a therapeutic effect at the intended dosage. Excipients may act to a) aid in processing of the drug delivery system during manufacture, b) protect, support or enhance stability, bioavailability or patient acceptability of the API, c) assist in product identification, and/or d) enhance any other attribute of the overall safety, effectiveness, of delivery of the API during storage or use. A pharmaceutically acceptable excipient may or may not be an inert substance.

[0115] Excipients include, but are not limited to: absorption enhancers, anti-adherents, anti-foaming agents, anti-oxidants, binders, buffering agents, carriers, coating agents, colors, delivery enhancers, delivery polymers, dextran, dextrose, diluents, disintegrants, emulsifiers, extenders, fillers, flavors, glidants, humectants, lubricants, oils, polymers, preservatives, saline, salts, solvents, sugars, suspending agents, sustained release matrices, sweeteners, thickening agents, tonicity agents, vehicles, water-repelling agents, and wetting agents.

[0116] A pharmaceutical composition can contain other additional components commonly found in pharmaceutical compositions. Such additional components include, but are not limited to: anti-pruritics, astringents, local anesthetics, or anti-inflammatory agents (e.g., antihistamine, diphenhydramine, etc.). It is also envisioned that cells, tissues or isolated organs that express or comprise the herein defined RNAi agents may be used as “pharmaceutical compositions”. As used herein, “pharmacologically effective amount,” “therapeutically effective amount,” or simply “effective amount” refers to that amount of an RNAi agent to produce the intended pharmacological, therapeutic or preventive result.

[0117] In some embodiments, a described LPA RNAi agent is combined one or more additional therapeutics or treatments including, but not limited to: a second LPA RNAi agent or other RNAi agent, a small molecule drug, an antibody, an antibody fragment, and/or a vaccine. Examples of additional therapeutics include, but are not limited to, HMg Co-A reductase inhibitors (statins), ezetimibe, PCSK-9 inhibitors, CTEP inhibitors, therapies targeting ANGPTL3, therapies targeting APOC3, and niacin.

[0118] The described RNAi agents and pharmaceutical compositions comprising LPA RNAi agents disclosed herein may be packaged or included in a kit, container, pack, or dispenser. The LPA RNAi agents and pharmaceutical compositions comprising said LPA RNAi agents may be packaged in pre-filled syringes or vials.

[0119] In some embodiments, pharmaceutical compositions comprising at least one of the described LPA RNAi agents are contemplated. These pharmaceutical compositions are useful in the inhibition of the expression of the LPA gene in a cell, a tissue, or an organism. In some embodiments, the described pharmaceutical compositions are used to treat a subject having a disease, condition, or disorder that would benefit from reduction or inhibition in LPA expression. In some embodiments, the described pharmaceutical compositions are used to treat a subject at risk of developing a disease, condition, or disorder that would benefit from reduction or inhibition in LPA expression. Diseases, conditions, or disorders that would benefit from reduction or inhibition in LPA expression include, but are not limited to: Berger's disease, peripheral artery disease, coronary artery disease, metabolic syndrome, acute coronary syndrome, aortic valve stenosis, aortic valve regurgitation, aortic dissection, retinal artery occlusion, cerebrovascular disease, mesenteric ischemia, superior mesenteric artery occlusion, renal artery stenosis, stable/unstable angina, acute coronary syndrome, heterozygous or homozygous familial hypercholesterolemia, hyperapobetalipoproteinemia, cerebrovascular atherosclerosis, cerebrovascular disease, and venous thrombosis. In some embodiments, the subject is a mammal, including, but not limited to, a human patient.

[0120] Cells, tissues, and non-human organisms that include at least one of the LPA RNAi agents described herein is contemplated. The cell, tissue, or non-human organism is made by delivering the RNAi agent to the cell, tissue, or non-human organism by any means available in the art. In some embodiments, the cell is a mammalian cell, including, but not limited to, a human cell. The cell, tissue, or non-human organisms are useful for research or as research tools (e.g., drug testing or diagnoses).

### Method of Treatment

[0121] In some embodiments, the LPA RNAi agents described herein are used to treat a subject having a disease, condition, or disorder or at risk of having a disease, condition, or disorder that would benefit from reduction or inhibition in LPA expression. Treatment of a subject that would benefit from a reduction and/or inhibition of LPA gene expression includes therapeutic and/or prophylactic treatment. Examples of diseases, conditions, or disorders, include, but not limited to: Berger's disease, peripheral artery disease, coronary artery disease, metabolic syndrome, acute coronary syndrome, aortic valve stenosis, aortic valve regurgitation, aortic dissection, retinal artery occlusion, cerebrovascular disease, mesenteric ischemia, superior mesenteric artery occlusion, renal artery stenosis, stable/unstable angina, acute coronary syndrome, heterozygous or homozygous familial hypercholesterolemia, hyperapobetalipoproteinemia, cerebrovascular atherosclerosis, cerebrovascular disease, and venous thrombosis. In some embodiments, the method comprises administering a composition, such as a pharmaceutical composition, comprising an LPA RNAi agent described herein to a mammal to be treated.

[0122] In some embodiments, a therapeutically effective amount of one or more of the described LPA RNAi agents is administered to a subject, thereby inhibiting expression of LPA in the subject (e.g., an amount effective to inhibit expression of LPA in the subject). In some embodiments, one or more of the LPA RNAi agents described herein are used to treat a subject having a disease or disorder that would benefit from reduction or inhibition in LPA expression. In some embodiments, the described LPA RNAi agents are used to treat or prevent at least one symptom in a subject having a disease or disorder that would benefit from reduction or inhibition in LPA expression. The subject is administered a therapeutically effective amount of any one or more of the described RNAi agents thereby treating the symptom. In some embodiments, the subject is administered a prophylactically effective amount of any one or more of the described RNAi agents thereby preventing the at least one symptom.

[0123] In some embodiments, an LPA RNAi agent is used to treat or manage a clinical presentation wherein a subject in need of such treatment, prevention, or management is administered a therapeutically or prophylactically effective amount of one or more of the LPA RNAi agents or LPA RNAi agent-containing compositions described herein. In some embodiments, the method comprises administering a composition comprising an LPA RNAi agent described herein to a mammal to be treated.

[0124] In some embodiments, the methods further comprise the step of administering a second therapeutic or treatment. In some embodiments, the second therapeutic is another LPA RNAi agent (e.g., a LPA RNAi agent which targets a different sequence within the LPA target). In other embodiments, the second therapeutic can be selected from the group comprising: small molecule drug, antibody, antibody fragment, and vaccine.

[0125] The route of administration is the path by which an RNAi agent is brought into contact with the body. In general, methods of administering drugs and nucleic acids for treatment of a subject are well known in the art and can be applied to administration of the compositions described herein. The compounds described herein can be administered via any suitable route in a preparation appropriately tailored to the particular route. Thus, the compounds described herein can be administered by injection, for example, intravenously, intramuscularly, intracutaneously, subcutaneously, or intraperitoneally.

[0126] In some embodiments, the LPA RNAi agents or compositions described herein can be delivered to a cell, group of cells, tissue, or subject using oligonucleotide delivery technologies known in the art. In general, any suitable method recognized in the art for delivering a nucleic acid molecule (in vitro or in vivo) can be adapted for use with an LPA RNAi agent described herein. For example, delivery can be by local administration, (e.g., direct injection, implantation, or topical administering), systemic administration, or subcutaneous, intravenous, oral, intraperitoneal, or parenteral routes, including intracranial (e.g., intraventricular, intraparenchymal and intrathecal), intramuscular, transdermal, airway (aerosol), nasal, rectal, or topical (including buccal and sublingual) administration, In certain embodiments, the compositions are administered by subcutaneous or intravenous infusion or injection.

[0127] In some embodiments, the RNAi agents can be combined with lipids, nanoparticles, polymers, liposomes, micelles, DPCs or other delivery systems available in the art. The RNAi agents can also be chemically conjugated to targeting groups, lipids (including, but not limited to cholesterol and cholesteryl derivatives), nanoparticles, polymers, liposomes, micelles, DPCs (se e.g., WO 2000/053722, WO 2008/0022309, WO 2011/104169, and WO 2012/083185, each of which is incorporated herein by reference), or other delivery systems available in the art. An LPA RNAi agent can be conjugated to a delivery polymer. In some embodiments, the delivery polymer is a reversibly masked/modified amphipathic membrane active polyamine.

### Inhibition of Expression

[0128] As used herein, the terms “silence,” “reduce,” “inhibit,” “down-regulate,” or “knockdown gene expression,” when referring to an LPA gene, mean that the expression of the gene, as measured by the level of RNA transcribed from the gene or the level of polypeptide, protein, or protein subunit translated from the mRNA in a cell, group of cells, or tissue, in which the LPA gene is transcribed, is reduced when the cell, group of cells, or tissue, is treated with the described LPA RNAi agents as compared to a second cell, group of cells, or tissue that has or has not been so treated or compared to the same cell, group of cells, or tissue, prior to administration of the LPA RNAi agent.

[0129] In some embodiments, the gene expression level and/or mRNA level of LPA in a subject to whom a described LPA RNAi agent is administered is reduced by at least about 5%, 10%, 15%, 20%, 25%, 30%, 35%, 40%, 45%, 50%, 55%, 60%, 65%, 70%, 75%, 80%, 85%, 90%, 95%, or 98% relative to the subject prior to being administered the LPA RNAi agent or to a subject not receiving the LPA RNAi agent. The gene expression level and/or mRNA level in the subject may be reduced in a cell, group of cells, and/or tissue of the subject. In some embodiments, the protein level of LPA in a subject to whom a described LPA RNAi agent has been administered is reduced by at least about 5%, 10%, 15%, 20%, 25%, 30%, 35%, 40%, 45%, 50%, 55%, 60%, 65%, 70%, 75%, 80%, 85%, 90%, 95%, or 98% relative to the subject prior to being administered the LPA RNAi agent or to a subject not receiving the LPA RNAi agent. The protein level in the subject may be reduced in a cell, group of cells, tissue, blood, and/or other fluid of the subject. A reduction in gene expression, mRNA, or protein levels can be assessed by any methods known in the art. Reduction or decrease in LPA mRNA level and/or protein level are collectively referred to herein as a reduction or decrease in LPA or inhibiting or reducing the expression of LPA.

[0130] Introducing into a cell, when referring to an RNAi agent, means functionally delivering the RNAi agent into the cell. By functional delivery, it is meant that the RNAi agent is delivered to the cell and has the expected biological activity, (e.g., sequence-specific inhibition of gene expression).

### Cells and Tissues and Non-Human Organisms

[0131] Cells, tissues, and non-human organisms that include at least one of the LPA RNAi agents described herein is contemplated. The cell, tissue, or non-human organism is made by delivering the RNAi agent to the cell, tissue, or non-human organism.

[0132] The above provided embodiments and items are now illustrated with the following, non-limiting examples.

### EXAMPLES

### Example 1. RNAi Agent Synthesis

[0133] A) Synthesis. LPA RNAi agents were synthesized according to phosphoramidite technology on solid phase used in oligonucleotide synthesis. Depending on the scale either a MerMade96E (Bioautomation) or a MerMade12 (Bioautomation) was used. Syntheses were performed on a solid support made of controlled pore glass (CPG, 500 A or 600A, obtained from Prime Synthesis, Aston, PA, USA). All DNA, 2′-modified RNA, and UNA phosphoramidites were purchased from Thermo Fisher Scientific (Milwaukee, WI, USA). Specifically, the following 2′-O-Methyl phosphoramidites were used: (5′-O-dimethoxytrityl-N⁶-(benzoyl)-2′-O-methyl-adenosine-3′-O-(2-cyanoethyl-N,N-diisopropy-lamino) phosphoramidite, 5′-O-dimethoxy-trityl-N⁴-(acetyl)-2′-O-methyl-cytidine-3′-O-(2-cyanoethyl-N,N-diisopropyl-amino) phosphoramidite, (5′-O-dimethoxytrityl-N²-(isobutyryl)-2′-O-methyl-guanosine-3′-O-(2-cyano-ethyl-N,N-diisopropylamino)phosphoramidite, and 5′-O-dimethoxy-trityl-2′-O-methyl-uridine-3′-O-(2-cyanoethyl-N,N-diisopropylamino)phosphoramidite. The 2′-Deoxy-2′-fluoro-phosphor-amidites carried the same protecting groups as the 2′-O-methyl RNA amidites. The following UNA phosphoramidites were used: 5′-(4,4′-Dimethoxytrityl)-N-benzoyl-2′,3′-seco-adenosine, 2′-benzoyl-3′-[(2-cyanoethyl)-(N,N-diisopropyl)]-phosphor-amidite, 5′-(4,4′-Dimethoxytrityl)-N-acetyl-2′,3′-seco-cytosine, 2′-benzoyl-3′-[(2-cyanoethyl)-(N,N-diiso-propyl)]-phosphoramidite, 5′-(4,4′-Dimethoxytrityl)-N-isobutyryl-2′,3′-seco-guanosine, 2′-benzoyl-3′-[(2-cyanoethyl)-(N,N-diisopropyl)]-phosphoramidite, and 5′-(4,4′-Dimethoxy-trityl)-2′,3′-seco-uridine, 2′-benzoyl-3′-[(2-cyanoethyl)-(N,N-diiso-propyl)]-phosphoramidite. All amidites were dissolved in anhydrous acetonitrile (50 mM) and molecular sieves (3A) were added. In order to introduce the TEG-Cholesterol at the 5′-end of the oligomers, the 1-Dimethoxytrityloxy-3-O—(N-cholesteryl-3-aminopropyl)-triethyleneglycol-glyceryl-2-O-(2-cyanoethyl)-(N,N,-diisopropyl)-phosphoramidite from Glen Research (Sterling, VA, USA) was employed. The 5′-modifications were introduced without any modification of the synthesis cycle. 5-Benzylthio-1H-tetrazole (BTT, 250 mM in acetonitrile) was used as activator solution. Coupling times were 10 min (RNA), 180 sec (Cholesterol), 90 sec (2′OMe and UNA), and 60 sec (2′F and DNA). In order to introduce phosphorothioate linkages, a 100 mM solution of 3-phenyl 1,2,4-dithiazoline-5-one (POS, obtained from PolyOrg, Inc., Leominster, MA, USA) in anhydrous Acetonitrile was employed. See Tables 1, 2A, and 2B for specific sequences.

[0134] B. Cleavage and deprotection of support bound oligomer. After finalization of the solid phase synthesis, the dried solid support was treated with a 1:1 volume solution of 40 wt. % methylamine in water and 28% ammonium hydroxide solution (Aldrich) for two hours at 30° C. The solution was evaporated and the solid residue was reconstituted in water (see below).

[0135] C. Purification. Crude Cholesterol containing oligomers were purified by reverse phase HPLC using a Waters XBridge BEH300 C4 5 u Prep column and a Shimadzu LC-8 system. Buffer A was 100 mM TEAA, pH 7.5 and contained 5% Acetonitrile and buffer B was 100 mM TEAA and contained 95% Acetonitrile. UV traces at 260 nm were recorded. Appropriate fractions were then run on size exclusion HPLC using a GE Healthcare XK 16/40 column packed with Sephadex G-25 medium with a running buffer of 100 mM ammonium bicarbonate, pH 6.7 and 20% Acetonitrile. Other crude oligomers were purified by anionic exchange HPLC using a TKSgel SuperQ-5PW 13 u column and Shimadzu LC-8 system. Buffer A was 20 mM Tris, 5 mM EDTA, pH 9.0 and contained 20% Acetonitrile and buffer B was the same as buffer A with the addition of 1.5 M sodium chloride. UV traces at 260 nm were recorded. Appropriate fractions were pooled then run on size exclusion HPLC as described for cholesterol containing oligomers.

[0136] D. Annealing. Complementary strands were mixed by combining equimolar solutions (sense and antisense) in 0.2×PBS (Phosphate-Buffered Saline, 1×, Corning, Cellgro) to form the RNAi agents. This solution was placed into a thermomixer at 70° C., heated to 95° C., held at 95° C. for 5 min, and cooled to room temperature slowly. Some RNAi agents were lyophilized and stored at −15 to −25° C. Duplex concentration was determined by measuring the solution absorbance on a UV-Vis spectrometer in 0.2×PBS. The solution absorbance at 260 nm was then multiplied by a conversion factor and the dilution factor to determine the duplex concentration. Unless otherwise stated, all conversion factor was 0.037 mg/(mL·cm). For some experiments, a conversion factor was calculated from an experimentally determined extinction coefficient.

### Example 2. Primary In Vitro Analysis of LPA RNAi Agents

[0137] Candidate sequences identified as

[0138] human and non-human primate cross-reactive by in silico analysis were screened. 108 in silico-identified potential LPA RNAi agents were synthesized and screened for efficacy in vitro in three groups. For screening purposes, the human LPA cDNA sequence (accession #NM_005577.1) was sub-cloned from a commercially available mammalian expression vector (Origene, Rockville, MD) into a commercially-available, reporter-based screening plasmid, psiCHECK2 (Promega, Madison, WI) which generated a Renilla luciferase/LPA fusion mRNA. For LPA RNAi agent efficacy in the human background, Hep3B cells, a human hepatocellular carcinoma line, were plated at ˜10,000 cells per well in 96-well format. Each of the 108 LPA RNAi agents was co-transfected at two or three concentrations (1 nM and 0.1 nM, or 0.02, 0.2 and 2 nM) with 50-100 ng LPA-psiCHECK2 plasmid DNA per well and 0.2 μL LipoFectamine 2000 per well. Gene knockdown was determined by measuring Renilla luciferase levels normalized to the levels of constitutively-expressed firefly luciferase, also present on the psiCHECK2 plasmid, using the Dual Luciferase Reporter Assay (Promega, Madison, WI) (Tables 5A and 5B).

TABLE 5A
In vitro analyses of LPA RNAi agents,
inhibition of LPA expression.

| | Relative R_{luc}-LPA expression | | | |
|---|---|---|---|---|
| Duplex | 1 nM | | 0. 1 nM | |
| ID# | Average | SD | Average | SD |
| AD00571 | 1.012 | 0.146 | 1.107 | 0.174 |
| AD00572 | 0.776 | 0.062 | 1.075 | 0.089 |
| AD00573 | 0.708 | 0.054 | 0.708 | 0.134 |
| AD00574 | 0.441 | 0.028 | 0.525 | 0.056 |
| AD00575 | 0.242 | 0.038 | 0.365 | 0.035 |
| AD00576 | 0.166 | 0.047 | 0.341 | 0.073 |
| AD00577 | 0.702 | 0.115 | 0.934 | 0.036 |
| AD00578 | 0.272 | 0.008 | 0.599 | 0.200 |
| AD00579 | 0.290 | 0.031 | 0.447 | 0.066 |
| AD00580 | 0.825 | 0.145 | 0.991 | 0.123 |
| AD00581 | 0.654 | 0.095 | 0.986 | 0.127 |
| AD00582 | 0.610 | 0.178 | 0.791 | 0.244 |
| AD00583 | 0.824 | 0.208 | 0.845 | 0.240 |
| AD00584 | 0.800 | 0.150 | 0.683 | 0.077 |
| AD00585 | 0.387 | 0.059 | 0.488 | 0.151 |
| AD00586 | 0.754 | 0.116 | 0.927 | 0.103 |
| AD00587 | 0.921 | 0.074 | 0.923 | 0.052 |
| AD00588 | 0.763 | 0.203 | 0.954 | 0.169 |
| AD00589 | 0.838 | 0.115 | 1.026 | 0.216 |
| AD00590 | 0.959 | 0.091 | 0.991 | 0.285 |
| AD00591 | 0.970 | 0.172 | 0.984 | 0.244 |
| AD00592 | 0.600 | 0.060 | 0.886 | 0.069 |
| AD00593 | 0.555 | 0.097 | 0.883 | 0.130 |
| AD00594 | 0.645 | 0.056 | 0.567 | 0.008 |
| AD00595 | 0.812 | 0.132 | 1.076 | 0.285 |
| AD00596 | 0.658 | 0.116 | 0.787 | 0.153 |
| AD00597 | 0.999 | 0.120 | 1.083 | 0.143 |
| AD00598 | 0.501 | 0.067 | 0.631 | 0.036 |
| AD00599 | 0.890 | 0.098 | 0.871 | 0.143 |
| AD00600 | 0.393 | 0.018 | 0.729 | 0.172 |
| AD00601 | 0.896 | 0.180 | 1.142 | 0.140 |
| AD00602 | 0.653 | 0.134 | 0.955 | 0.062 |
| AD00603 | 0.730 | 0.118 | 0.799 | 0.187 |
| AD00604 | 0.892 | 0.058 | 0.956 | 0.107 |
| AD00605 | 1.006 | 0.193 | 1.006 | 0.146 |
| AD00606 | 0.509 | 0.039 | 0.570 | 0.054 |
| AD00607 | 0.816 | 0.091 | 0.906 | 0.068 |
| AD00608 | 0.883 | 0.111 | 1.158 | 0.054 |
| AD00609 | 0.515 | 0.079 | 0.691 | 0.137 |
| AD00610 | 0.628 | 0.057 | 0.748 | 0.090 |
| AD00611 | 1.320 | 0.066 | 1.116 | 0.046 |
| AD00612 | 1.103 | 0.193 | 1.100 | 0.052 |
| AD00613 | 0.910 | 0.094 | 0.878 | 0.040 |
| AD00614 | 1.101 | 0.111 | 1.097 | 0.043 |
| AD00615 | 1.051 | 0.140 | 0.898 | 0.161 |
| AD00616 | 0.898 | 0.101 | 1.029 | 0.042 |
| AD00617 | 0.715 | 0.023 | 0.802 | 0.150 |
| AD00618 | 0.434 | 0.073 | 0.441 | 0.199 |
| AD00619 | 0.758 | 0.003 | 0.820 | 0.165 |
| AD00620 | 0.984 | 0.124 | 0.926 | 0.080 |
| AD00621 | 0.308 | 0.033 | 0.267 | 0.044 |
| AD00622 | 0.493 | 0.072 | 0.790 | 0.009 |
| AD00623 | 0.641 | 0.081 | 0.599 | 0.014 |
| AD00624 | 0.795 | 0.019 | 0.985 | 0.123 |
| AD00625 | 0.768 | 0.121 | 0.944 | 0.117 |
| AD00626 | 0.981 | 0.081 | 1.036 | 0.036 |
| AD00627 | 0.943 | 0.163 | 0.936 | 0.038 |
| AD00628 | 0.765 | 0.069 | 0.995 | 0.090 |
| AD00629 | 1.001 | 0.184 | 1.199 | 0.064 |
| AD00630 | 0.963 | 0.149 | 1.154 | 0.141 |
| AD00631 | 0.979 | 0.084 | 1.038 | 0.088 |
| AD00632 | 0.781 | 0.048 | 0.858 | 0.101 |
| AD00633 | 0.817 | 0.072 | 1.027 | 0.143 |
| AD00634 | 0.807 | 0.087 | 0.978 | 0.256 |
| AD00635 | 0.496 | 0.073 | 0.377 | 0.023 |
| AD00636 | 0.615 | 0.102 | 0.748 | 0.072 |
| AD00637 | 0.792 | 0.056 | 1.070 | 0.048 |

TABLE 5B
In vitro analyses of LPA RNAi agents,
inhibition of LPA expression.

| | Relative R_{luc}-LPA expression | | | | | |
|---|---|---|---|---|---|---|
| Duplex | 2 nM | | 0.2 nM | | 0.02 nM | |
| ID# | Average | SD | Average | SD | Average | SD |
| AD01068 | 0.780 | 0.110 | 0.792 | 0.326 | 0.861 | 0.138 |
| AD01069 | 0.483 | 0.345 | 1.062 | 0.181 | 0.869 | 0.112 |
| AD01070 | 0.747 | 0.441 | 1.010 | 0.015 | 1.015 | 0.319 |
| AD01071 | 1.014 | 0.254 | 0.850 | 0.251 | 0.857 | 0.284 |
| AD01072 | 0.919 | 0.107 | 1.137 | 0.345 | 0.727 | 0.124 |
| AD01073 | 0.539 | 0.224 | 1.066 | 0.195 | 1.180 | 0.356 |
| AD01074 | 0.713 | 0.545 | 0.953 | 0.419 | 0.841 | 0.077 |
| AD01075 | 0.703 | 0.379 | 0.913 | 0.204 | 0.965 | 0.216 |
| AD01076 | 1.145 | 0.485 | 1.027 | 0.287 | 0.647 | 0.154 |
| AD01077 | 0.672 | 0.074 | 1.166 | 0.384 | 0.703 | 0.106 |
| AD01078 | 0.575 | 0.192 | 0.847 | 0.237 | 0.908 | 0.071 |
| AD01079 | 0.863 | 0.673 | 1.093 | 0.187 | 1.004 | 0.086 |
| AD01328 | 0.623 | 0.089 | 1.205 | 0.367 | 1.238 | 0.089 |
| AD01329 | 0.467 | 0.068 | 1.161 | 0.159 | 1.115 | 0.102 |
| AD01330 | 1.158 | 0.124 | 0.920 | 0.143 | 1.156 | 0.107 |
| AD01331 | 1.476 | 0.225 | 1.092 | 0.269 | 1.304 | 0.320 |
| AD01332 | 1.145 | 0.109 | 1.100 | 0.454 | 0.941 | 0.510 |
| AD01333 | 0.829 | 0.011 | 1.382 | 0.252 | 1.338 | 0.303 |
| AD01334 | 0.653 | 0.122 | 1.323 | 0.183 | 1.095 | 0.109 |
| AD01335 | 0.858 | 0.089 | 1.632 | 0.318 | 1.201 | 0.159 |
| AD01336 | 1.019 | 0.081 | 1.724 | 0.353 | 1.008 | 0.072 |
| AD01337 | 0.834 | 0.143 | 1.494 | 0.657 | 1.130 | 0.309 |
| AD01338 | 1.276 | 0.340 | 0.719 | 0.118 | 0.896 | 0.118 |
| AD01339 | 1.240 | 0.298 | 1.114 | 0.287 | 0.960 | 0.104 |
| AD01340 | 1.055 | 0.423 | 1.272 | 0.136 | 1.338 | 0.299 |
| AD01341 | 1.206 | 0.438 | 1.510 | 0.315 | 1.046 | 0.143 |
| AD01342 | 1.243 | 0.324 | 1.137 | 0.298 | 1.159 | 0.047 |
| AD01343 | 1.113 | 0.140 | 1.045 | 0.151 | 1.108 | 0.094 |
| AD01344 | 0.931 | 0.182 | 1.317 | 0.244 | 1.328 | 0.037 |
| AD01345 | 0.795 | 0.233 | 0.799 | 0.032 | 1.418 | 0.184 |
| AD01346 | 1.095 | 0.224 | 1.045 | 0.073 | 1.465 | 0.109 |
| AD01347 | 1.122 | 0.021 | 1.209 | 0.161 | 1.153 | 0.159 |
| AD01348 | 1.022 | 0.068 | 1.228 | 0.244 | 1.097 | 0.049 |
| AD01349 | 0.934 | 0.151 | 1.217 | 0.080 | 1.068 | 0.149 |
| AD01350 | 0.871 | 0.295 | 1.318 | 0.225 | 0.942 | 0.395 |
| AD01351 | 1.414 | 0.065 | 1.121 | 0.180 | 1.029 | 0.049 |
| AD01352 | 0.868 | 0.088 | 1.024 | 0.385 | 1.049 | 0.176 |
| AD01353 | 1.150 | 0.478 | 1.164 | 0.276 | 0.898 | 0.175 |
| AD01354 | 0.999 | 0.119 | 1.378 | 0.292 | 1.507 | 0.289 |
| AD01355 | 0.943 | 0.092 | 1.066 | 0.268 | 1.411 | 0.113 |
| AD01356 | 1.116 | 0.351 | 1.072 | 0.196 | 1.000 | 0.145 |

TABLE 5C
In vitro analyses of 10 mM LPA
RNAi agents, inhibition of LPA expression.

| Duplex No. | LPA levels |
|---|---|
| AD01803 | 0.77 ± 0.06 |
| AD01805 | 0.77 ± 0.02 |
| AD01806 | 1.01 ± 0.02 |
| AD01807 | 0.97 ± 0.09 |
| AD01808 | 0.78 ± 0.12 |
| AD01809 | 1.06 ± 0.13 |
| AD01810 | 1.06 ± 0.05 |
| AD01811 | 0.86 ± 0.05 |
| AD01812 | 1.08 ± 0.04 |
| AD01813 | 0.99 ± 0.13 |
| AD01814 | 0.57 ± 0.05 |
| AD01815 | 0.65 ± 0.00 |
| AD01816 | 0.84 ± 0.08 |
| AD01817 | 0.75 ± 0.10 |
| AD01818 | 0.94 ± 0.07 |
| AD01819 | 1.21 ± 0.08 |
| AD01820 | 1.22 ± 0.12 |
| AD01821 | 1.16 ± 0.01 |
| AD01822 | 1.22 ± 0.04 |
| AD01823 | 0.91 ± 0.05 |
| AD01824 | 1.22 ± 0.13 |
| AD01825 | 1.25 ± 0.05 |
| AD01826 | 1.18 ± 0.15 |
| AD01827 | 1.23 ± 0.07 |
| AD01828 | 1.02 ± 0.09 |
| AD01829 | 1.05 ± 0.07 |
| AD01830 | 1.00 ± 0.35 |
| AD01831 | 1.02 ± 0.07 |
| AD01832 | 1.04 ± 0.06 |
| AD01896 | 0.71 ± 0.14 |
| AD01897 | 0.87 ± 0.10 |
| AD01898 | 1.16 ± 0.03 |
| AD01899 | 0.79 ± 0.11 |
| AD01900 | 0.82 ± 0.06 |
| AD01901 | 0.54 ± 0.04 |
| AD01902 | 0.62 ± 0.00 |
| AD01903 | 0.66 ± 0.08 |
| AD01912 | 0.59 ± 0.01 |
| AD01913 | 0.60 ± 0.04 |
| AD01914 | 0.50 ± 0.03 |
| AD01915 | 0.58 ± 0.08 |
| AD01916 | 0.49 ± 0.04 |
| AD01917 | 0.53 ± 0.04 |
| AD01918 | 0.47 ± 0.04 |
| AD01919 | 0.60 ± 0.02 |
| AD01920 | 0.60 ± 0.03 |
| AD01921 | 0.59 ± 0.06 |
| AD01922 | 0.50 ± 0.04 |
| AD01923 | 0.59 ± 0.04 |
| AD01924 | 0.50 ± 0.02 |
| AD01925 | 0.54 ± 0.05 |
| AD01926 | 0.52 ± 0.05 |
| AD01927 | 0.57 ± 0.04 |
| AD01928 | 0.50 ± 0.06 |
| AD01929 | 0.55 ± 0.04 |
| AD01930 | 0.54 ± 0.06 |
| AD01931 | 0.54 ± 0.07 |
| AD01932 | 0.51 ± 0.01 |
| AD01933 | 0.56 ± 0.06 |
| AD01934 | 0.52 ± 0.08 |
| AD01935 | 0.58 ± 0.03 |
| AD01936 | 0.53 ± 0.02 |
| AD01937 | 0.57 ± 0.04 |
| AD01938 | 0.58 ± 0.03 |
| AD01939 | 0.65 ± 0.05 |
| AD01940 | 0.49 ± 0.03 |
| AD01941 | 0.57 ± 0.02 |

TABLE 5D
In vitro analyses of 1 mM LPA RNAi
agents, inhibition of LPA expression.

| Duplex | LPA | Duplex | LPA | Duplex | LPA |
|---|---|---|---|---|---|
| No. | levels | No. | levels | No. | levels |
| AD01760 | 0.10 ± 0.01 | AD02330 | 0.37 ± 0.01 | AD02090 | 0.68 ± 0.04 |
| AD01722 | 0.14 ± 0.01 | AD02243 | 0.37 ± 0.02 | AD02161 | 0.68 ± 0.04 |
| AD01757 | 0.15 ± 0.00 | AD02255 | 0.38 ± 0.02 | AD02324 | 0.68 ± 0.02 |
| AD01719 | 0.15 ± 0.00 | AD02257 | 0.38 ± 0.00 | AD02177 | 0.69 ± 0.07 |
| AD01738 | 0.18 ± 0.01 | AD02169 | 0.38 ± 0.02 | AD02179 | 0.69 ± 0.07 |
| AD01755 | 0.19 ± 0.01 | AD02081 | 0.38 ± 0.00 | AD02527 | 0.69 ± 0.03 |
| AD01741 | 0.20 ± 0.00 | AD02186 | 0.38 ± 0.02 | AD02305 | 0.69 ± 0.06 |
| AD01759 | 0.23 ± 0.02 | AD01744 | 0.38 ± 0.03 | AD02092 | 0.70 ± 0.02 |
| AD01747 | 0.23 ± 0.03 | AD02075 | 0.38 ± 0.01 | AD02535 | 0.70 ± 0.10 |
| AD01752 | 0.24 ± 0.03 | AD02135 | 0.38 ± 0.03 | AD02376 | 0.71 ± 0.04 |
| AD01736 | 0.24 ± 0.02 | AD02114 | 0.38 ± 0.04 | AD01743 | 0.71 ± 0.02 |
| AD02311 | 0.25 ± 0.05 | AD02188 | 0.38 ± 0.04 | AD02289 | 0.71 ± 0.04 |
| AD02201 | 0.25 ± 0.03 | AD02318 | 0.38 ± 0.02 | AD02530 | 0.71 ± 0.06 |
| AD01750 | 0.25 ± 0.00 | AD02388 | 0.38 ± 0.02 | AD01709 | 0.71 ± 0.12 |
| AD01756 | 0.25 ± 0.01 | AD02115 | 0.38 ± 0.04 | AD02249 | 0.71 ± 0.06 |
| AD02291 | 0.25 ± 0.03 | AD02133 | 0.38 ± 0.00 | AD02534 | 0.71 ± 0.03 |
| AD02292 | 0.26 ± 0.01 | AD02183 | 0.38 ± 0.04 | AD02213 | 0.71 ± 0.02 |
| AD02266 | 0.26 ± 0.02 | AD02116 | 0.38 ± 0.02 | AD02529 | 0.71 ± 0.03 |
| AD01763 | 0.26 ± 0.01 | AD02132 | 0.39 ± 0.03 | AD01711 | 0.71 ± 0.06 |
| AD02259 | 0.26 ± 0.03 | AD02400 | 0.39 ± 0.02 | AD02341 | 0.72 ± 0.06 |
| AD02327 | 0.26 ± 0.02 | AD02338 | 0.39 ± 0.04 | AD02233 | 0.72 ± 0.06 |
| AD02274 | 0.27 ± 0.03 | AD02112 | 0.39 ± 0.01 | AD02342 | 0.73 ± 0.04 |
| AD02297 | 0.27 ± 0.02 | AD02354 | 0.39 ± 0.05 | AD02395 | 0.73 ± 0.06 |
| AD02147 | 0.27 ± 0.03 | AD01749 | 0.40 ± 0.06 | AD02306 | 0.73 ± 0.09 |
| AD02365 | 0.27 ± 0.04 | AD02312 | 0.40 ± 0.02 | AD02344 | 0.73 ± 0.04 |
| AD02260 | 0.27 ± 0.03 | AD02240 | 0.40 ± 0.00 | AD02145 | 0.74 ± 0.09 |
| AD02368 | 0.27 ± 0.01 | AD02313 | 0.40 ± 0.03 | AD02326 | 0.74 ± 0.06 |
| AD02265 | 0.28 ± 0.03 | AD01710 | 0.40 ± 0.05 | AD02414 | 0.74 ± 0.04 |
| AD02293 | 0.28 ± 0.04 | AD02301 | 0.40 ± 0.05 | AD02379 | 0.74 ± 0.06 |
| AD02350 | 0.28 ± 0.02 | AD02425 | 0.40 ± 0.04 | AD02532 | 0.75 ± 0.04 |
| AD02202 | 0.28 ± 0.03 | AD02099 | 0.41 ± 0.04 | AD02178 | 0.75 ± 0.11 |
| AD02203 | 0.28 ± 0.03 | AD01723 | 0.41 ± 0.04 | AD02195 | 0.75 ± 0.05 |
| AD02258 | 0.28 ± 0.05 | AD02391 | 0.41 ± 0.03 | AD02123 | 0.76 ± 0.07 |
| AD02295 | 0.28 ± 0.03 | AD02392 | 0.41 ± 0.05 | AD02164 | 0.77 ± 0.09 |
| AD02363 | 0.28 ± 0.04 | AD02083 | 0.41 ± 0.01 | AD01726 | 0.77 ± 0.01 |
| AD02273 | 0.28 ± 0.02 | AD02155 | 0.41 ± 0.02 | AD02231 | 0.77 ± 0.05 |
| AD02386 | 0.28 ± 0.02 | AD02082 | 0.41 ± 0.01 | AD02180 | 0.77 ± 0.04 |
| AD02309 | 0.28 ± 0.03 | AD02336 | 0.41 ± 0.01 | AD02412 | 0.77 ± 0.05 |
| AD02382 | 0.29 ± 0.01 | AD02101 | 0.41 ± 0.02 | AD02251 | 0.77 ± 0.02 |
| AD02256 | 0.29 ± 0.02 | AD01728 | 0.42 ± 0.01 | AD02396 | 0.78 ± 0.13 |
| AD02367 | 0.29 ± 0.03 | AD02424 | 0.42 ± 0.04 | AD02160 | 0.78 ± 0.04 |
| AD02275 | 0.29 ± 0.04 | AD02175 | 0.42 ± 0.02 | AD02533 | 0.78 ± 0.05 |
| AD02206 | 0.29 ± 0.01 | AD02225 | 0.42 ± 0.05 | AD02290 | 0.78 ± 0.03 |
| AD02332 | 0.29 ± 0.02 | AD02086 | 0.43 ± 0.02 | AD02378 | 0.78 ± 0.07 |
| AD01717 | 0.29 ± 0.03 | AD01725 | 0.43 ± 0.06 | AD02394 | 0.79 ± 0.04 |
| AD02296 | 0.29 ± 0.01 | AD02374 | 0.43 ± 0.03 | AD02415 | 0.79 ± 0.05 |
| AD02264 | 0.29 ± 0.03 | AD02390 | 0.43 ± 0.04 | AD02181 | 0.79 ± 0.08 |
| AD02278 | 0.29 ± 0.03 | AD02227 | 0.43 ± 0.02 | AD02492 | 0.79 ± 0.06 |
| AD02385 | 0.29 ± 0.00 | AD02137 | 0.43 ± 0.06 | AD02397 | 0.79 ± 0.05 |
| AD02205 | 0.29 ± 0.04 | AD02085 | 0.43 ± 0.01 | AD02398 | 0.79 ± 0.09 |
| AD02149 | 0.29 ± 0.02 | AD02407 | 0.43 ± 0.03 | AD02416 | 0.79 ± 0.04 |
| AD02239 | 0.30 ± 0.05 | AD02100 | 0.44 ± 0.04 | AD02144 | 0.79 ± 0.09 |
| AD01748 | 0.30 ± 0.02 | AD02406 | 0.44 ± 0.04 | AD02531 | 0.79 ± 0.06 |
| AD02404 | 0.30 ± 0.01 | AD02136 | 0.44 ± 0.02 | AD02489 | 0.80 ± 0.04 |
| AD01721 | 0.30 ± 0.03 | AD02209 | 0.44 ± 0.03 | AD02307 | 0.80 ± 0.10 |
| AD02277 | 0.30 ± 0.05 | AD02154 | 0.44 ± 0.02 | AD02308 | 0.80 ± 0.11 |
| AD02152 | 0.30 ± 0.01 | AD02171 | 0.44 ± 0.01 | AD02182 | 0.80 ± 0.08 |
| AD02237 | 0.30 ± 0.02 | AD02261 | 0.45 ± 0.02 | AD02198 | 0.80 ± 0.11 |
| AD02098 | 0.30 ± 0.03 | AD02271 | 0.45 ± 0.00 | AD02199 | 0.80 ± 0.10 |
| AD02381 | 0.30 ± 0.02 | AD02371 | 0.45 ± 0.03 | AD02200 | 0.80 ± 0.06 |
| AD02315 | 0.30 ± 0.02 | AD02173 | 0.45 ± 0.07 | AD02125 | 0.81 ± 0.06 |
| AD02366 | 0.30 ± 0.01 | AD02319 | 0.45 ± 0.01 | AD02141 | 0.81 ± 0.01 |
| AD02242 | 0.31 ± 0.03 | AD02176 | 0.46 ± 0.01 | AD02516 | 0.81 ± 0.06 |
| AD02294 | 0.31 ± 0.02 | AD02428 | 0.46 ± 0.02 | AD02127 | 0.81 ± 0.06 |
| AD02346 | 0.31 ± 0.04 | AD02410 | 0.46 ± 0.01 | AD02380 | 0.81 ± 0.03 |
| AD02329 | 0.31 ± 0.02 | AD01746 | 0.46 ± 0.05 | AD02124 | 0.81 ± 0.05 |
| AD02348 | 0.31 ± 0.01 | AD01732 | 0.46 ± 0.02 | AD02197 | 0.81 ± 0.02 |
| AD01714 | 0.31 ± 0.05 | AD02157 | 0.47 ± 0.02 | AD02159 | 0.81 ± 0.09 |
| AD01724 | 0.31 ± 0.01 | AD02372 | 0.47 ± 0.03 | AD02485 | 0.82 ± 0.04 |
| AD02170 | 0.31 ± 0.02 | AD02427 | 0.47 ± 0.02 | AD02142 | 0.82 ± 0.08 |
| AD02352 | 0.31 ± 0.02 | AD02370 | 0.47 ± 0.01 | AD02126 | 0.82 ± 0.08 |
| AD02093 | 0.31 ± 0.01 | AD02172 | 0.47 ± 0.04 | AD02254 | 0.82 ± 0.10 |
| AD02383 | 0.31 ± 0.02 | AD02158 | 0.47 ± 0.02 | AD02232 | 0.82 ± 0.04 |
| AD02284 | 0.31 ± 0.04 | AD02270 | 0.48 ± 0.04 | AD02146 | 0.82 ± 0.04 |
| AD02219 | 0.31 ± 0.04 | AD02426 | 0.48 ± 0.04 | AD02490 | 0.82 ± 0.03 |
| AD02279 | 0.31 ± 0.03 | AD02361 | 0.48 ± 0.04 | AD01745 | 0.82 ± 0.09 |
| AD02299 | 0.31 ± 0.05 | AD02245 | 0.48 ± 0.02 | AD02162 | 0.83 ± 0.04 |
| AD01740 | 0.31 ± 0.02 | AD02373 | 0.48 ± 0.01 | AD02471 | 0.83 ± 0.11 |
| AD02417 | 0.32 ± 0.01 | AD02084 | 0.48 ± 0.05 | AD02487 | 0.83 ± 0.09 |
| AD02364 | 0.32 ± 0.02 | AD02194 | 0.48 ± 0.03 | AD02523 | 0.83 ± 0.10 |
| AD02262 | 0.32 ± 0.03 | AD01753 | 0.48 ± 0.06 | AD02483 | 0.83 ± 0.03 |
| AD02369 | 0.32 ± 0.01 | AD02320 | 0.48 ± 0.03 | AD02128 | 0.84 ± 0.09 |
| AD01731 | 0.32 ± 0.02 | AD02268 | 0.48 ± 0.05 | AD02143 | 0.84 ± 0.05 |
| AD02349 | 0.32 ± 0.01 | AD02226 | 0.49 ± 0.01 | AD02214 | 0.84 ± 0.13 |
| AD02095 | 0.32 ± 0.02 | AD02156 | 0.49 ± 0.01 | AD02217 | 0.84 ± 0.07 |
| AD02281 | 0.32 ± 0.01 | AD02409 | 0.49 ± 0.03 | AD02250 | 0.84 ± 0.08 |
| AD02224 | 0.32 ± 0.06 | AD02244 | 0.49 ± 0.02 | AD02163 | 0.85 ± 0.04 |
| AD02148 | 0.32 ± 0.04 | AD02189 | 0.49 ± 0.06 | AD02525 | 0.85 ± 0.06 |
| AD01718 | 0.33 ± 0.01 | AD01764 | 0.50 ± 0.02 | AD02481 | 0.85 ± 0.03 |
| AD02333 | 0.33 ± 0.01 | AD02174 | 0.50 ± 0.04 | AD02235 | 0.85 ± 0.03 |
| AD02403 | 0.33 ± 0.01 | AD02117 | 0.50 ± 0.01 | AD02539 | 0.86 ± 0.05 |
| AD02317 | 0.33 ± 0.03 | AD02208 | 0.50 ± 0.05 | AD02470 | 0.86 ± 0.07 |
| AD02399 | 0.33 ± 0.02 | AD02104 | 0.51 ± 0.03 | AD02469 | 0.86 ± 0.04 |
| AD02222 | 0.33 ± 0.01 | AD02408 | 0.51 ± 0.06 | AD02480 | 0.86 ± 0.07 |
| AD02310 | 0.33 ± 0.02 | AD02272 | 0.51 ± 0.04 | AD02488 | 0.87 ± 0.05 |
| AD01733 | 0.33 ± 0.01 | AD02122 | 0.51 ± 0.06 | AD02511 | 0.87 ± 0.05 |
| AD02131 | 0.33 ± 0.01 | AD02140 | 0.51 ± 0.04 | AD02482 | 0.87 ± 0.04 |
| AD02353 | 0.33 ± 0.03 | AD02362 | 0.51 ± 0.04 | AD02519 | 0.87 ± 0.08 |
| AD02263 | 0.33 ± 0.03 | AD01739 | 0.52 ± 0.04 | AD02491 | 0.88 ± 0.05 |
| AD02204 | 0.33 ± 0.01 | AD02121 | 0.52 ± 0.06 | AD02216 | 0.88 ± 0.00 |
| AD02080 | 0.33 ± 0.00 | AD02138 | 0.52 ± 0.04 | AD02215 | 0.88 ± 0.03 |
| AD02298 | 0.33 ± 0.03 | AD02358 | 0.52 ± 0.02 | AD02468 | 0.88 ± 0.06 |
| AD01737 | 0.33 ± 0.01 | AD01734 | 0.53 ± 0.06 | AD02526 | 0.88 ± 0.06 |
| AD02220 | 0.33 ± 0.04 | AD01713 | 0.53 ± 0.04 | AD02234 | 0.88 ± 0.14 |
| AD02302 | 0.33 ± 0.00 | AD02285 | 0.53 ± 0.03 | AD02518 | 0.89 ± 0.05 |
| AD02097 | 0.33 ± 0.00 | AD02102 | 0.53 ± 0.07 | AD02218 | 0.89 ± 0.04 |
| AD02328 | 0.33 ± 0.02 | AD02303 | 0.53 ± 0.03 | AD02515 | 0.89 ± 0.03 |
| AD02221 | 0.33 ± 0.01 | AD02212 | 0.53 ± 0.01 | AD02536 | 0.89 ± 0.11 |
| AD02421 | 0.33 ± 0.02 | AD02139 | 0.53 ± 0.03 | AD02537 | 0.89 ± 0.04 |
| AD02420 | 0.33 ± 0.03 | AD02230 | 0.54 ± 0.08 | AD02465 | 0.89 ± 0.07 |
| AD02347 | 0.33 ± 0.04 | AD02103 | 0.54 ± 0.04 | AD02196 | 0.90 ± 0.03 |
| AD02134 | 0.34 ± 0.01 | AD02191 | 0.54 ± 0.03 | AD02253 | 0.90 ± 0.05 |
| AD02078 | 0.34 ± 0.03 | AD02429 | 0.54 ± 0.02 | AD02484 | 0.90 ± 0.09 |
| AD02151 | 0.34 ± 0.02 | AD01716 | 0.54 ± 0.09 | AD02467 | 0.91 ± 0.00 |
| AD02238 | 0.34 ± 0.03 | AD02360 | 0.54 ± 0.02 | AD02538 | 0.91 ± 0.10 |
| AD02168 | 0.34 ± 0.00 | AD01762 | 0.54 ± 0.01 | AD02478 | 0.91 ± 0.01 |
| AD02096 | 0.34 ± 0.03 | AD01735 | 0.55 ± 0.07 | AD02479 | 0.92 ± 0.05 |
| AD01758 | 0.34 ± 0.05 | AD02248 | 0.55 ± 0.05 | AD02540 | 0.92 ± 0.08 |
| AD02077 | 0.34 ± 0.02 | AD02193 | 0.55 ± 0.01 | AD02524 | 0.92 ± 0.03 |
| AD02345 | 0.34 ± 0.02 | AD02119 | 0.55 ± 0.01 | AD02466 | 0.92 ± 0.05 |
| AD02384 | 0.34 ± 0.02 | AD02287 | 0.55 ± 0.02 | AD02520 | 0.92 ± 0.06 |
| AD02094 | 0.34 ± 0.01 | AD02357 | 0.56 ± 0.01 | AD02498 | 0.92 ± 0.06 |
| AD02419 | 0.34 ± 0.04 | AD01708 | 0.57 ± 0.06 | AD02472 | 0.92 ± 0.05 |
| AD02401 | 0.34 ± 0.02 | AD02247 | 0.57 ± 0.06 | AD02106 | 0.93 ± 0.08 |
| AD02402 | 0.34 ± 0.03 | AD02430 | 0.58 ± 0.07 | AD02486 | 0.93 ± 0.02 |
| AD01712 | 0.34 ± 0.04 | AD02339 | 0.58 ± 0.03 | AD02236 | 0.93 ± 0.04 |
| AD02276 | 0.34 ± 0.01 | AD02321 | 0.59 ± 0.03 | AD02543 | 0.93 ± 0.12 |
| AD02150 | 0.34 ± 0.02 | AD02269 | 0.59 ± 0.02 | AD02517 | 0.94 ± 0.05 |
| AD02166 | 0.34 ± 0.03 | AD02210 | 0.59 ± 0.04 | AD02505 | 0.94 ± 0.10 |
| AD02351 | 0.34 ± 0.02 | AD02211 | 0.60 ± 0.02 | AD02464 | 0.94 ± 0.06 |
| AD02241 | 0.35 ± 0.04 | AD02091 | 0.60 ± 0.03 | AD02499 | 0.94 ± 0.16 |
| AD02282 | 0.35 ± 0.01 | AD02120 | 0.60 ± 0.07 | AD02500 | 0.94 ± 0.05 |
| AD02130 | 0.35 ± 0.04 | AD02229 | 0.60 ± 0.03 | AD02544 | 0.95 ± 0.07 |
| AD01751 | 0.35 ± 0.03 | AD01727 | 0.60 ± 0.02 | AD02541 | 0.95 ± 0.15 |
| AD02356 | 0.35 ± 0.03 | AD01730 | 0.60 ± 0.02 | AD02509 | 0.95 ± 0.09 |
| AD02405 | 0.35 ± 0.04 | AD02190 | 0.60 ± 0.07 | AD02508 | 0.95 ± 0.10 |
| AD02129 | 0.35 ± 0.01 | AD02411 | 0.60 ± 0.06 | AD02510 | 0.95 ± 0.03 |
| AD02355 | 0.35 ± 0.01 | AD02322 | 0.61 ± 0.03 | AD02521 | 0.96 ± 0.16 |
| AD02423 | 0.35 ± 0.06 | AD02433 | 0.61 ± 0.02 | AD02507 | 0.96 ± 0.03 |
| AD02316 | 0.35 ± 0.02 | AD01761 | 0.62 ± 0.05 | AD02105 | 0.96 ± 0.09 |
| AD02331 | 0.35 ± 0.02 | AD01720 | 0.62 ± 0.02 | AD02495 | 0.96 ± 0.05 |
| AD02335 | 0.35 ± 0.01 | AD02228 | 0.62 ± 0.06 | AD02504 | 0.97 ± 0.04 |
| AD02187 | 0.35 ± 0.03 | AD02393 | 0.62 ± 0.03 | AD02493 | 0.97 ± 0.06 |
| AD02314 | 0.36 ± 0.04 | AD02359 | 0.62 ± 0.03 | AD02542 | 0.97 ± 0.06 |
| AD02300 | 0.36 ± 0.03 | AD02323 | 0.62 ± 0.05 | AD02503 | 0.98 ± 0.05 |
| AD02387 | 0.36 ± 0.06 | AD02118 | 0.63 ± 0.05 | AD02107 | 0.98 ± 0.05 |
| AD02337 | 0.36 ± 0.04 | AD02286 | 0.63 ± 0.04 | AD02477 | 0.98 ± 0.06 |
| AD01729 | 0.36 ± 0.01 | AD02087 | 0.63 ± 0.04 | AD02501 | 0.98 ± 0.07 |
| AD02283 | 0.36 ± 0.02 | AD01715 | 0.63 ± 0.06 | AD02497 | 0.98 ± 0.05 |
| AD02185 | 0.36 ± 0.01 | AD02192 | 0.63 ± 0.02 | AD02494 | 0.98 ± 0.13 |
| AD02167 | 0.36 ± 0.01 | AD02431 | 0.64 ± 0.06 | AD02475 | 1.00 ± 0.07 |
| AD02076 | 0.36 ± 0.04 | AD02340 | 0.64 ± 0.03 | AD02514 | 1.00 ± 0.00 |
| AD02418 | 0.36 ± 0.01 | AD02432 | 0.64 ± 0.02 | AD02474 | 1.00 ± 0.03 |
| AD02422 | 0.36 ± 0.03 | AD02089 | 0.65 ± 0.07 | AD02502 | 1.01 ± 0.01 |
| AD02111 | 0.36 ± 0.02 | AD02267 | 0.65 ± 0.11 | AD02522 | 1.01 ± 0.04 |
| AD02079 | 0.37 ± 0.02 | AD02246 | 0.65 ± 0.07 | AD02476 | 1.01 ± 0.09 |
| AD01754 | 0.37 ± 0.04 | AD02325 | 0.65 ± 0.03 | AD02513 | 1.02 ± 0.03 |
| AD02334 | 0.37 ± 0.02 | AD02343 | 0.66 ± 0.05 | AD02109 | 1.02 ± 0.06 |
| AD02280 | 0.37 ± 0.05 | AD02375 | 0.66 ± 0.04 | AD02252 | 1.02 ± 0.08 |
| AD02113 | 0.37 ± 0.03 | AD02288 | 0.66 ± 0.06 | AD02496 | 1.04 ± 0.05 |
| AD02389 | 0.37 ± 0.03 | AD02088 | 0.66 ± 0.01 | AD02473 | 1.05 ± 0.04 |
| AD02223 | 0.37 ± 0.04 | AD02413 | 0.66 ± 0.03 | AD02506 | 1.05 ± 0.05 |
| AD02184 | 0.37 ± 0.02 | AD02377 | 0.67 ± 0.05 | AD01742 | 1.07 ± 0.24 |
| AD02153 | 0.37 ± 0.02 | AD02528 | 0.67 ± 0.04 | AD02110 | 1.08 ± 0.07 |
| AD02165 | 0.37 ± 0.02 | AD02434 | 0.67 ± 0.05 | AD02512 | 1.09 ± 0.17 |
| AD02207 | 0.37 ± 0.01 | AD02304 | 0.67 ± 0.02 | AD02108 | 1.11 ± 0.04 |

### Example 3. LPA RNAi Agent EC₅₀ Determination

[0139] Ten-point EC₅₀ curves were generated using the same cells and transfection conditions, with LPA RNAi agent concentrations ranging from 150 fM4-3 nM. EC₅₀ were determined using GraphPad Prism software (Table 6).

TABLE 6
EC₅₀ values (nM) determined in vitro for the
indicated LPA RNAi agents.

| Duplex ID# | EC₅₀ (nM) |
|---|---|
| AD00575 | 0.073 |
| AD00576 | 0.038 |
| AD00578 | 0.112 |
| AD00579 | 0.083 |
| AD00621 | 0.100 |
| AD00635 | 0.577 |
| AD01070 | 0.6388 |
| AD01072 | 0.1068 |
| AD01073 | 0.1154 |
| AD01074 | 0.2903 |

### Example 4. In Vitro Analysis of Structure-Activity Relationship (SAR) Designed LPA RNAi Agents

[0140] LPA RNAi agent SAR sets (364 sequences based on AD01532 and 351 sequences based on AD01533) were synthesized and screened for efficacy in vitro. For screening purposes, 2756 bp of the human LPA cDNA sequence from KIV-3 to KIV-9 (accession #NM_005577.1) was synthesized and cloned (GeneWiz, South Plainfield, NJ) into a commercially-available, reporter-based screening plasmid, psiCHECK2 (Promega, Madison, WI) which generated a Renilla luciferase/LPA fusion mRNA. For LPA RNAi agent efficacy in the human background, HuH7 cells, a human hepatocellular carcinoma line, were plated at ˜7500 cells per well in 96-well format. Each of the LPA RNAi agents was co-transfected at two concentrations (1 nM and 0.1 nM, or 10 nM and 1 nM) with 25 ng LPA-psiCHECK2 plasmid DNA per well and 0.2 μL LipoFectamine 2000 per well. Gene knockdown was determined by measuring Renilla luciferase levels normalized to the levels of constitutively-expressed firefly luciferase, also present on the psiCHECK2 plasmid, using the Dual Luciferase Reporter Assay (Promega, Madison, WI) (Tables 7A and 7B).

TABLE 7A
Efficacy screen results of LPA RNAi agents in
vitro, as determined by dual-luciferase reporter assay.

| | Relative R_{luc}-LPA | |
|---|---|---|
| Duplex | expression | |
| ID No. | 1 nM | 0.1 nM |
| SD0001 | 0.570 | 0.907 |
| SD0002 | 0.873 | 1.061 |
| SD0003 | 0.955 | 1.020 |
| SD0004 | 0.845 | 1.007 |
| SD0005 | 0.603 | 0.891 |
| SD0006 | 0.551 | 0.780 |
| SD0007 | 0.510 | 0.797 |
| SD0008 | 0.544 | 0.892 |
| SD0009 | 0.564 | 0.878 |
| SD0010 | 0.542 | 1.051 |
| SD0011 | 0.513 | 0.873 |
| SD0012 | 0.533 | 0.963 |
| SD0013 | 0.541 | 0.979 |
| SD0014 | 0.551 | 0.987 |
| SD0015 | 0.488 | 0.951 |
| SD0016 | 0.588 | 0.868 |
| SD0017 | 1.023 | 1.005 |
| SD0018 | 0.866 | 0.965 |
| SD0019 | 0.792 | 1.005 |
| SD0020 | 0.633 | 0.860 |
| SD0021 | 0.572 | 0.797 |
| SD0022 | 0.610 | 0.874 |
| SD0023 | 0.550 | 0.836 |
| SD0024 | 0.597 | 0.859 |
| SD0025 | 0.587 | 0.899 |
| SD0026 | 0.570 | 0.898 |
| SD0027 | 0.580 | 0.825 |
| SD0028 | 0.612 | 0.885 |
| SD0029 | 0.528 | 0.866 |
| SD0030 | 0.657 | 0.825 |
| SD0031 | 0.560 | 0.914 |
| SD0032 | 0.664 | 0.976 |
| SD0033 | 0.787 | 1.035 |
| SD0034 | 0.739 | 1.002 |
| SD0035 | 0.658 | 0.949 |
| SD0036 | 0.554 | 0.896 |
| SD0037 | 0.557 | 0.873 |
| SD0038 | 0.528 | 0.854 |
| SD0039 | 0.511 | 0.847 |
| SD0040 | 0.554 | 0.976 |
| SD0041 | 0.559 | 0.823 |
| SD0042 | 0.496 | 0.825 |
| SD0043 | 0.563 | 0.851 |
| SD0044 | 0.476 | 0.861 |
| SD0045 | 0.542 | 0.841 |
| SD0046 | 0.651 | 0.980 |
| SD0047 | 0.967 | 0.995 |
| SD0048 | 0.694 | 0.936 |
| SD0049 | 0.960 | 0.946 |
| SD0050 | 0.692 | 0.971 |
| SD0051 | 0.611 | 0.905 |
| SD0052 | 0.657 | 0.849 |
| SD0053 | 0.642 | 0.848 |
| SD0054 | 0.598 | 0.852 |
| SD0055 | 0.494 | 0.828 |
| SD0056 | 0.524 | 0.885 |
| SD0057 | 0.582 | 0.816 |
| SD0058 | 0.597 | 0.866 |
| SD0059 | 0.560 | 0.905 |
| SD0060 | 0.594 | 0.849 |
| SD0061 | 0.571 | 1.058 |
| SD0062 | 0.871 | 1.157 |
| SD0063 | 0.969 | 1.138 |
| SD0064 | 0.555 | 1.019 |
| SD0065 | 0.671 | 0.953 |
| SD0066 | 0.561 | 0.951 |
| SD0067 | 0.612 | 0.904 |
| SD0068 | 0.573 | 0.938 |
| SD0069 | 0.574 | 0.975 |
| SD0070 | 0.606 | 1.030 |
| SD0071 | 0.494 | 0.959 |
| SD0072 | 0.557 | 0.892 |
| SD0073 | 0.593 | 0.984 |
| SD0074 | 0.544 | 0.894 |
| SD0075 | 0.552 | 0.937 |
| SD0076 | 0.513 | 1.058 |
| SD0077 | 0.930 | 1.071 |
| SD0078 | 0.984 | 1.006 |
| SD0079 | 0.853 | 1.031 |
| SD0080 | 0.577 | 0.942 |
| SD0081 | 0.595 | 1.044 |
| SD0082 | 0.652 | 0.962 |
| SD0083 | 0.583 | 0.928 |
| SD0084 | 0.540 | 1.049 |
| SD0085 | 0.523 | 0.961 |
| SD0086 | 0.536 | 0.956 |
| SD0087 | 0.586 | 0.987 |
| SD0088 | 0.563 | 0.892 |
| SD0089 | 0.555 | 0.947 |
| SD0090 | 0.599 | 0.928 |
| SD0091 | 0.665 | 0.854 |
| SD0092 | 1.002 | 0.917 |
| SD0093 | 1.047 | 0.880 |
| SD0094 | 0.867 | 0.911 |
| SD0095 | 0.919 | 0.868 |
| SD0096 | 0.666 | 0.887 |
| SD0097 | 0.673 | 0.737 |
| SD0098 | 0.567 | 0.809 |
| SD0099 | 0.604 | 0.909 |
| SD0100 | 0.557 | 0.880 |
| SD0101 | 0.545 | 0.806 |
| SD0102 | 0.728 | 0.900 |
| SD0103 | 0.719 | 0.928 |
| SD0104 | 0.766 | 0.955 |
| SD0105 | 0.965 | 0.927 |
| SD0106 | 1.161 | 1.006 |
| SD0107 | 1.048 | 0.966 |
| SD0108 | 1.066 | 0.985 |
| SD0109 | 1.111 | 0.917 |
| SD0110 | 1.152 | 0.954 |
| SD0111 | 1.045 | 0.944 |
| SD0112 | 1.089 | 1.019 |
| SD0113 | 0.949 | 0.935 |
| SD0114 | 0.875 | 1.033 |
| SD0115 | 1.022 | 1.077 |
| SD0116 | 0.947 | 1.028 |
| SD0117 | 0.946 | 1.021 |
| SD0118 | 0.879 | 0.977 |
| SD0119 | 0.963 | 1.016 |
| SD0120 | 0.967 | 0.948 |
| SD0121 | 0.651 | 0.897 |
| SD0122 | 1.085 | 1.111 |
| SD0123 | 1.153 | 1.052 |
| SD0124 | 0.955 | 0.936 |
| SD0125 | 0.928 | 0.928 |
| SD0126 | 1.033 | 0.933 |
| SD0127 | 0.637 | 0.717 |
| SD0128 | 0.630 | 0.653 |
| SD0129 | 1.052 | 1.192 |
| SD0130 | 1.025 | 1.107 |
| SD0131 | 1.280 | 1.059 |
| SD0132 | 1.094 | 1.024 |
| SD0133 | 1.113 | 1.031 |
| SD0134 | 0.928 | 0.991 |
| SD0135 | 0.804 | 1.023 |
| SD0136 | 1.028 | 1.104 |
| SD0137 | 0.902 | 1.149 |
| SD0138 | 0.942 | 1.015 |
| SD0139 | 0.984 | 1.068 |
| SD0140 | 0.953 | 1.091 |
| SD0141 | 0.925 | 1.022 |
| SD0142 | 0.906 | 0.994 |
| SD0143 | 0.898 | 0.990 |
| SD0144 | 0.858 | 0.972 |
| SD0145 | 0.917 | 0.947 |
| SD0146 | 0.850 | 0.906 |
| SD0147 | 0.933 | 0.995 |
| SD0148 | 0.856 | 0.994 |
| SD0149 | 0.882 | 0.985 |
| SD0150 | 0.810 | 1.002 |
| SD0151 | 0.813 | 0.909 |
| SD0152 | 0.963 | 1.031 |
| SD0153 | 1.058 | 0.936 |
| SD0154 | 0.968 | 0.944 |
| SD0155 | 0.969 | 0.940 |
| SD0156 | 0.933 | 0.807 |
| SD0157 | 0.906 | 0.913 |
| SD0158 | 0.926 | 0.964 |
| SD0159 | 0.805 | 0.850 |
| SD0160 | 0.895 | 0.965 |
| SD0161 | 0.865 | 1.006 |
| SD0162 | 0.935 | 1.029 |
| SD0163 | 0.928 | 0.985 |
| SD0164 | 0.920 | 0.957 |
| SD0165 | 1.039 | 1.110 |
| SD0166 | 1.061 | 1.023 |
| SD0167 | 1.020 | 0.982 |
| SD0168 | 1.053 | 0.989 |
| SD0169 | 1.002 | 1.018 |
| SD0170 | 1.078 | 0.982 |
| SD0171 | 0.838 | 0.923 |
| SD0172 | 1.025 | 0.934 |
| SD0173 | 0.864 | 0.963 |
| SD0174 | 1.020 | 1.043 |
| SD0175 | 1.128 | 1.046 |
| SD0176 | 1.009 | 1.110 |
| SD0177 | 0.735 | 0.975 |
| SD0178 | 0.824 | 1.074 |
| SD0179 | 0.690 | 0.895 |
| SD0180 | 0.572 | 0.914 |
| SD0181 | 0.904 | 1.028 |
| SD0182 | 1.176 | 1.093 |
| SD0183 | 1.247 | 1.090 |
| SD0184 | 1.097 | 0.974 |
| SD0185 | 1.045 | 0.985 |
| SD0186 | 0.940 | 0.943 |
| SD0187 | 0.883 | 0.994 |
| SD0188 | ND | ND |
| SD0189 | 0.872 | 0.977 |
| SD0190 | 0.861 | 1.166 |
| SD0191 | 0.779 | 1.044 |
| SD0192 | 0.796 | 1.116 |
| SD0193 | 0.975 | 1.112 |
| SD0194 | 0.876 | 1.058 |
| SD0195 | 0.747 | 0.970 |
| SD0196 | 0.787 | 1.086 |
| SD0197 | 1.276 | 1.127 |
| SD0198 | 1.144 | 1.140 |
| SD0199 | 1.136 | 1.101 |
| SD0200 | 0.814 | 0.911 |
| SD0201 | 0.733 | 0.915 |
| SD0202 | 0.576 | 0.933 |
| SD0203 | 0.593 | 0.824 |
| SD0204 | 0.882 | 1.038 |
| SD0205 | 0.681 | 1.012 |
| SD0206 | 0.600 | 0.927 |
| SD0207 | 0.738 | 0.974 |
| SD0208 | 0.638 | 0.883 |
| SD0209 | 0.641 | 0.878 |
| SD0210 | 0.544 | 0.886 |
| SD0211 | 0.702 | 0.920 |
| SD0212 | 0.704 | 0.854 |
| SD0213 | 0.655 | 0.887 |
| SD0214 | 0.629 | 0.860 |
| SD0215 | 0.598 | 0.850 |
| SD0216 | 0.611 | 0.782 |
| SD0217 | 0.710 | 0.806 |
| SD0218 | 0.738 | 0.758 |
| SD0219 | 0.664 | 0.809 |
| SD0220 | 1.133 | 0.891 |
| SD0221 | 0.940 | 0.914 |
| SD0222 | 0.853 | 0.882 |
| SD0223 | 0.691 | 0.889 |
| SD0224 | 0.997 | 1.033 |
| SD0225 | 0.954 | 0.998 |
| SD0226 | 1.202 | 0.997 |
| SD0227 | 0.948 | 1.017 |
| SD0228 | 0.786 | 0.947 |
| SD0229 | 0.620 | 0.830 |
| SD0230 | 0.840 | 0.972 |
| SD0231 | 0.904 | 0.890 |

TABLE 7B
Efficacy screen results of LPA RNAi agents
in vitro, as determined by dual-luciferase reporter assay.

| | Relative | |
|---|---|---|
| | R_{luc}-LPA | |
| Duplex | expression | |
| ID # | 10 nM | 1 nM |
| SD0232 | 0.659 | 0.699 |
| SD0233 | 0.942 | 1.252 |
| SD0234 | 0.967 | 1.358 |
| SD0235 | 0.910 | 0.890 |
| SD0236 | 0.742 | 0.822 |
| SD0237 | 0.758 | 0.831 |
| SD0238 | 0.700 | 0.737 |
| SD0239 | 0.645 | 0.765 |
| SD0240 | 0.701 | 0.773 |
| SD0241 | 0.770 | 0.821 |
| SD0242 | 0.626 | 0.719 |
| SD0243 | 0.759 | 0.848 |
| SD0244 | 0.798 | 0.953 |
| SD0245 | 0.764 | 0.821 |
| SD0246 | 0.812 | 0.690 |
| SD0247 | 0.786 | 0.844 |
| SD0248 | 1.011 | 1.167 |
| SD0249 | 1.118 | 1.189 |
| SD0250 | 1.021 | 1.239 |
| SD0251 | 1.041 | 1.151 |
| SD0252 | 1.070 | 1.124 |
| SD0253 | 1.044 | 1.131 |
| SD0254 | 0.861 | 0.948 |
| SD0255 | 0.751 | 0.829 |
| SD0256 | 0.931 | 1.037 |
| SD0257 | 1.024 | 1.037 |
| SD0258 | 0.935 | 1.030 |
| SD0259 | 1.089 | 1.081 |
| SD0260 | 0.955 | 1.008 |
| SD0261 | 0.923 | 0.980 |
| SD0262 | 0.908 | 1.107 |
| SD0263 | 1.060 | 1.449 |
| SD0264 | 1.041 | 1.419 |
| SD0265 | 1.065 | 1.373 |
| SD0266 | 0.950 | 1.376 |
| SD0267 | 0.963 | 1.214 |
| SD0268 | 1.023 | 1.299 |
| SD0269 | 0.908 | 1.066 |
| SD0270 | 0.963 | 1.081 |
| SD0271 | 1.088 | 1.189 |
| SD0272 | 0.966 | 1.135 |
| SD0273 | 0.953 | 1.192 |
| SD0274 | 1.049 | 1.217 |
| SD0275 | 1.006 | 1.206 |
| SD0276 | 0.969 | 1.064 |
| SD0277 | 0.686 | 0.796 |
| SD0278 | 0.985 | 1.305 |
| SD0279 | 0.985 | 1.301 |
| SD0280 | 0.978 | 1.237 |
| SD0281 | 1.038 | 1.230 |
| SD0282 | 0.933 | 1.191 |
| SD0283 | 0.930 | 1.152 |
| SD0284 | 0.907 | 1.117 |
| SD0285 | 0.625 | 0.870 |
| SD0286 | 0.984 | 1.056 |
| SD0287 | 0.906 | 0.965 |
| SD0288 | 1.052 | 1.123 |
| SD0289 | 0.997 | 1.215 |
| SD0290 | 0.892 | 1.197 |
| SD0291 | 0.907 | 1.065 |
| SD0292 | 0.689 | 0.862 |
| SD0293 | 0.955 | 1.190 |
| SD0294 | 1.095 | 1.157 |
| SD0295 | 0.851 | 1.004 |
| SD0296 | 1.018 | 1.106 |
| SD0297 | 0.737 | 0.760 |
| SD0298 | 0.790 | 0.828 |
| SD0299 | 0.721 | 0.713 |
| SD0300 | 0.796 | 0.869 |
| SD0301 | 0.781 | 0.841 |
| SD0302 | 0.621 | 0.720 |
| SD0303 | 0.684 | 0.852 |
| SD0304 | 0.774 | 0.842 |
| SD0305 | 0.778 | 0.799 |
| SD0306 | 0.718 | 0.793 |
| SD0307 | 0.982 | 0.883 |
| SD0308 | 1.297 | 1.193 |
| SD0309 | 1.123 | 1.208 |
| SD0310 | 0.961 | 1.073 |
| SD0311 | 1.168 | 1.019 |
| SD0312 | 0.923 | 0.824 |
| SD0313 | 0.883 | 0.871 |
| SD0314 | 0.670 | 0.650 |
| SD0315 | 0.988 | 0.958 |
| SD0316 | 0.908 | 0.880 |
| SD0317 | 0.754 | 0.850 |
| SD0318 | 0.963 | 0.944 |
| SD0319 | 0.945 | 0.862 |
| SD0320 | 0.961 | 0.875 |
| SD0321 | 0.841 | 0.797 |
| SD0322 | 0.546 | 0.521 |
| SD0323 | 0.581 | 0.895 |
| SD0324 | 0.692 | 0.900 |
| SD0325 | 0.506 | 0.796 |
| SD0326 | 0.634 | 0.709 |
| SD0327 | 0.522 | 0.592 |
| SD0328 | 0.602 | 0.632 |
| SD0329 | 0.504 | 0.615 |
| SD0330 | 0.445 | 0.601 |
| SD0331 | 0.457 | 0.579 |
| SD0332 | 0.500 | 0.601 |
| SD0333 | 0.447 | 0.618 |
| SD0334 | 0.490 | 0.528 |
| SD0335 | 0.421 | 0.555 |
| SD0336 | 0.488 | 0.533 |
| SD0337 | 1.714 | 0.978 |
| SD0338 | 1.262 | 1.350 |
| SD0339 | 1.259 | 1.357 |
| SD0340 | 0.996 | 1.277 |
| SD0341 | 1.190 | 1.183 |
| SD0342 | 0.818 | 0.923 |
| SD0343 | 0.803 | 0.855 |
| SD0344 | 0.708 | 0.883 |
| SD0345 | 1.132 | 0.901 |
| SD0346 | 0.847 | 0.890 |
| SD0347 | 0.659 | 0.780 |
| SD0348 | 0.730 | 0.945 |
| SD0349 | 0.825 | 0.886 |
| SD0350 | 0.826 | 0.897 |
| SD0351 | 0.730 | 0.842 |
| SD0352 | 0.297 | 0.276 |
| SD0353 | 0.773 | 0.746 |
| SD0354 | 0.663 | 0.722 |
| SD0355 | 0.620 | 0.626 |
| SD0356 | 0.546 | 0.599 |
| SD0357 | 0.298 | 0.411 |
| SD0358 | 0.313 | 0.318 |
| SD0359 | 0.273 | 0.282 |
| SD0360 | 0.256 | 0.257 |
| SD0361 | 0.269 | 0.276 |
| SD0362 | 0.270 | 0.276 |
| SD0363 | 0.350 | 0.272 |
| SD0364 | 0.227 | 0.243 |
| SD0365 | 0.228 | 0.233 |
| SD0366 | 0.264 | 0.241 |
| SD0367 | 0.262 | 0.252 |
| SD0368 | 0.571 | 0.597 |
| SD0369 | 0.539 | 0.531 |
| SD0370 | 0.521 | 0.545 |
| SD0371 | 0.302 | 0.319 |
| SD0372 | 0.353 | 0.335 |
| SD0373 | 0.279 | 0.255 |
| SD0374 | 0.266 | 0.194 |
| SD0375 | 0.246 | 0.238 |
| SD0376 | 0.258 | 0.238 |
| SD0377 | 0.246 | 0.226 |
| SD0378 | 0.237 | 0.226 |
| SD0379 | 0.262 | 0.226 |
| SD0380 | 0.247 | 0.240 |
| SD0381 | 0.639 | 0.657 |
| SD0382 | 0.267 | 0.517 |
| SD0383 | 0.473 | 0.547 |
| SD0384 | 0.456 | 0.563 |
| SD0385 | 0.264 | 0.393 |
| SD0386 | 0.329 | 0.325 |
| SD0387 | 0.186 | 0.231 |
| SD0388 | 0.217 | 0.248 |
| SD0389 | 0.230 | 0.275 |
| SD0390 | 0.210 | 0.270 |
| SD0391 | 0.247 | 0.224 |
| SD0392 | 0.257 | 0.236 |
| SD0393 | 0.252 | 0.253 |
| SD0394 | 0.267 | 0.251 |
| SD0395 | 0.594 | 0.675 |
| SD0396 | 0.511 | 0.678 |
| SD0397 | 0.457 | 0.618 |
| SD0398 | 0.516 | 0.601 |
| SD0399 | 0.261 | 0.389 |
| SD0400 | 0.327 | 0.300 |
| SD0401 | 0.230 | 0.250 |
| SD0402 | 0.231 | 0.260 |
| SD0403 | 0.237 | 0.221 |
| SD0404 | 0.258 | 0.243 |
| SD0405 | 0.253 | 0.246 |
| SD0406 | 0.228 | 0.230 |
| SD0407 | 0.228 | 0.215 |
| SD0408 | 0.247 | 0.255 |
| SD0409 | 0.565 | 0.667 |
| SD0410 | 0.796 | 0.863 |
| SD0411 | 0.633 | 0.646 |
| SD0412 | 0.613 | 0.699 |
| SD0413 | 0.294 | 0.439 |
| SD0414 | 0.416 | 0.310 |
| SD0415 | 0.275 | 0.238 |
| SD0416 | 0.241 | 0.290 |
| SD0417 | 0.257 | 0.284 |
| SD0418 | 0.267 | 0.306 |
| SD0419 | 0.249 | 0.229 |
| SD0420 | 0.243 | 0.240 |
| SD0421 | 0.250 | 0.241 |
| SD0422 | 0.230 | 0.237 |
| SD0423 | 0.555 | 0.684 |
| SD0424 | 0.614 | 0.682 |
| SD0425 | 0.592 | 0.733 |
| SD0426 | 0.604 | 0.699 |
| SD0427 | 0.281 | 0.449 |
| SD0428 | 0.301 | 0.330 |
| SD0429 | 0.230 | 0.261 |
| SD0430 | 0.241 | 0.273 |
| SD0431 | 0.232 | 0.255 |
| SD0432 | 0.247 | 0.288 |
| SD0433 | 0.238 | 0.280 |
| SD0434 | 0.224 | 0.293 |
| SD0435 | 0.249 | 0.240 |
| SD0436 | 0.428 | 0.445 |
| SD0437 | 0.542 | 0.829 |
| SD0438 | 1.106 | 1.048 |
| SD0439 | 0.930 | 1.096 |
| SD0440 | 1.033 | 1.023 |
| SD0441 | 0.630 | 0.657 |
| SD0442 | 0.912 | 0.913 |
| SD0443 | 0.392 | 0.375 |
| SD0444 | 0.552 | 0.441 |
| SD0445 | 0.561 | 0.514 |
| SD0446 | 0.550 | 0.442 |
| SD0447 | 0.415 | 0.362 |
| SD0448 | 0.566 | 0.503 |
| SD0449 | 0.579 | 0.475 |
| SD0450 | 0.463 | 0.424 |
| SD0451 | 0.925 | 0.929 |
| SD0452 | 0.963 | 0.939 |
| SD0453 | 0.967 | 0.952 |
| SD0454 | 0.948 | 0.883 |
| SD0455 | 0.746 | 0.645 |
| SD0456 | 0.840 | 0.860 |
| SD0457 | 0.473 | 0.402 |
| SD0458 | 0.555 | 0.514 |
| SD0459 | 0.566 | 0.472 |
| SD0460 | 0.609 | 0.478 |
| SD0461 | 0.408 | 0.355 |
| SD0462 | 0.630 | 0.532 |
| SD0463 | 0.631 | 0.497 |
| SD0464 | 0.549 | 0.510 |
| SD0465 | 0.966 | 0.809 |
| SD0466 | 0.910 | 0.841 |
| SD0467 | 0.904 | 0.878 |
| SD0468 | 0.999 | 1.009 |
| SD0469 | 0.734 | 0.760 |
| SD0470 | 0.925 | 0.806 |
| SD0471 | 0.559 | 0.482 |
| SD0472 | 0.572 | 0.543 |
| SD0473 | 0.652 | 0.594 |
| SD0474 | 0.621 | 0.598 |
| SD0475 | 0.564 | 0.472 |
| SD0476 | 0.769 | 0.631 |
| SD0477 | 0.734 | 0.613 |
| SD0478 | 0.460 | 0.411 |
| SD0479 | 0.713 | 0.802 |
| SD0480 | 0.883 | 0.892 |
| SD0481 | 0.926 | 0.899 |
| SD0482 | 1.180 | 0.937 |
| SD0483 | 0.805 | 0.986 |
| SD0484 | 0.920 | 1.104 |
| SD0485 | 0.510 | 0.524 |
| SD0486 | 0.626 | 0.598 |
| SD0487 | 0.628 | 0.640 |
| SD0488 | 0.597 | 0.637 |
| SD0489 | 0.482 | 0.486 |
| SD0490 | 0.685 | 0.664 |
| SD0491 | 0.650 | 0.662 |
| SD0492 | 0.454 | 0.490 |
| SD0493 | 1.006 | 1.040 |
| SD0494 | 0.933 | 1.024 |
| SD0495 | 0.927 | 1.016 |
| SD0496 | 0.921 | 1.004 |
| SD0497 | 0.690 | 0.846 |
| SD0498 | 0.970 | 0.913 |
| SD0499 | 0.448 | 0.399 |
| SD0500 | 0.614 | 0.485 |
| SD0501 | 0.609 | 0.521 |
| SD0502 | 0.626 | 0.526 |
| SD0503 | 0.493 | 0.410 |
| SD0504 | 0.727 | 0.551 |
| SD0505 | 0.688 | 0.541 |
| SD0506 | 0.319 | 0.338 |
| SD0507 | 0.927 | 0.897 |
| SD0508 | 0.929 | 0.972 |
| SD0509 | 0.853 | 0.925 |
| SD0510 | 0.755 | 0.935 |
| SD0511 | 0.480 | 0.559 |
| SD0512 | 0.834 | 0.854 |
| SD0513 | 0.440 | 0.323 |
| SD0514 | 0.415 | 0.414 |
| SD0515 | 0.442 | 0.343 |
| SD0516 | 0.422 | 0.341 |
| SD0517 | 0.346 | 0.320 |
| SD0518 | 0.488 | 0.420 |
| SD0519 | 0.435 | 0.390 |
| SD0520 | 0.819 | 0.737 |
| SD0521 | 1.058 | 0.903 |
| SD0522 | 1.088 | 0.933 |
| SD0523 | 1.075 | 0.948 |
| SD0524 | 1.067 | 0.900 |
| SD0525 | 0.917 | 0.858 |
| SD0526 | 1.126 | 1.055 |
| SD0527 | 0.832 | 0.776 |
| SD0528 | 0.980 | 0.886 |
| SD0529 | 1.059 | 0.821 |
| SD0530 | 0.934 | 0.844 |
| SD0531 | 0.832 | 0.883 |
| SD0532 | 0.936 | 0.868 |
| SD0533 | 0.900 | 0.946 |
| SD0534 | 1.012 | 0.984 |
| SD0535 | 1.041 | 1.095 |
| SD0536 | 1.113 | 1.097 |
| SD0537 | 1.125 | 0.957 |
| SD0538 | 1.059 | 1.162 |
| SD0539 | 0.901 | 0.963 |
| SD0540 | 0.900 | 0.924 |
| SD0541 | 1.033 | 0.911 |
| SD0542 | 0.958 | 0.906 |
| SD0543 | 0.870 | 0.816 |
| SD0544 | 1.100 | 0.853 |
| SD0545 | 0.881 | 0.794 |
| SD0546 | 0.897 | 0.813 |
| SD0547 | 1.005 | 0.785 |
| SD0548 | 0.972 | 0.866 |
| SD0549 | 1.019 | 1.121 |
| SD0550 | 0.986 | 1.015 |
| SD0551 | 0.966 | 1.033 |
| SD0552 | 0.893 | 1.028 |
| SD0553 | 0.976 | 0.998 |
| SD0554 | 0.938 | 0.935 |
| SD0555 | 0.886 | 0.875 |
| SD0556 | 1.181 | 1.142 |
| SD0557 | 1.016 | 0.999 |
| SD0558 | 1.026 | 0.968 |
| SD0559 | 0.928 | 0.844 |
| SD0560 | 0.990 | 0.805 |
| SD0561 | 0.836 | 0.791 |
| SD0562 | 1.021 | 0.772 |
| SD0563 | 0.886 | 0.946 |
| SD0564 | 1.194 | 1.254 |
| SD0565 | 1.010 | 1.033 |
| SD0566 | 1.110 | 0.993 |
| SD0567 | 0.995 | 0.895 |
| SD0568 | 0.964 | 0.901 |
| SD0569 | 0.853 | 0.876 |
| SD0570 | 0.832 | 0.860 |
| SD0571 | 1.036 | 0.959 |
| SD0572 | 1.013 | 0.902 |
| SD0573 | 0.948 | 0.793 |
| SD0574 | 0.868 | 0.812 |
| SD0575 | 0.946 | 0.712 |
| SD0576 | 0.922 | 0.774 |
| SD0577 | 0.824 | 0.800 |
| SD0578 | 0.997 | 0.950 |
| SD0579 | 1.048 | 1.143 |
| SD0580 | 1.071 | 0.935 |
| SD0581 | 0.987 | 0.869 |
| SD0582 | 0.946 | 0.816 |
| SD0583 | 0.932 | 0.789 |
| SD0584 | 1.062 | 0.866 |
| SD0585 | 1.155 | 0.891 |
| SD0586 | 0.960 | 0.819 |
| SD0587 | 0.934 | 0.832 |
| SD0588 | 1.033 | 0.781 |
| SD0589 | 0.972 | 0.798 |
| SD0590 | 0.925 | 0.704 |
| SD0591 | 1.061 | 0.915 |
| SD0592 | 1.129 | 0.996 |
| SD0593 | 0.856 | 0.895 |
| SD0594 | 0.840 | 0.956 |
| SD0595 | 0.882 | 0.857 |
| SD0596 | 0.856 | 0.896 |
| SD0597 | 0.869 | 0.697 |
| SD0598 | 0.878 | 0.700 |
| SD0599 | 0.808 | 0.857 |
| SD0600 | 0.856 | 0.823 |
| SD0601 | 0.742 | 0.713 |
| SD0602 | 0.740 | 0.846 |
| SD0603 | 0.808 | 0.816 |
| SD0604 | 0.561 | 0.527 |
| SD0605 | 0.711 | 0.880 |
| SD0606 | 0.852 | 0.922 |
| SD0607 | 0.695 | 0.887 |
| SD0608 | 0.635 | 0.917 |
| SD0609 | 0.655 | 0.874 |
| SD0610 | 0.596 | 0.765 |
| SD0611 | 0.482 | 0.508 |
| SD0612 | 0.629 | 0.578 |
| SD0613 | 0.616 | 0.503 |
| SD0614 | 0.716 | 0.682 |
| SD0615 | 0.570 | 0.491 |
| SD0616 | 0.671 | 0.668 |
| SD0617 | 0.713 | 0.721 |
| SD0618 | 0.819 | 0.862 |
| SD0619 | 0.925 | 0.968 |
| SD0620 | 0.859 | 0.978 |
| SD0621 | 0.923 | 1.075 |
| SD0622 | 0.900 | 0.988 |
| SD0623 | 0.908 | 0.969 |
| SD0624 | 0.775 | 0.889 |
| SD0625 | 0.827 | 0.850 |
| SD0626 | 0.832 | 0.796 |
| SD0627 | 0.916 | 0.796 |
| SD0628 | 0.863 | 0.898 |
| SD0629 | 0.915 | 0.869 |
| SD0630 | 0.893 | 0.856 |
| SD0631 | 0.940 | 0.848 |
| SD0632 | 0.878 | 0.911 |
| SD0633 | 0.934 | 1.074 |
| SD0634 | 0.915 | 1.019 |
| SD0635 | 0.911 | 0.912 |
| SD0636 | 0.852 | 0.911 |
| SD0637 | 0.997 | 0.965 |
| SD0638 | 0.983 | 0.935 |
| SD0639 | 0.806 | 0.823 |
| SD0640 | 0.838 | 0.846 |
| SD0641 | 0.906 | 0.861 |
| SD0642 | 0.740 | 0.836 |
| SD0643 | 0.739 | 0.725 |
| SD0644 | 0.780 | 0.762 |
| SD0645 | 0.739 | 0.819 |
| SD0646 | 0.734 | 0.798 |
| SD0647 | 0.789 | 0.913 |
| SD0648 | 0.707 | 0.946 |
| SD0649 | 0.943 | 1.077 |
| SD0650 | 0.729 | 0.872 |
| SD0651 | 0.666 | 0.879 |
| SD0652 | 0.704 | 0.882 |
| SD0653 | 0.661 | 0.726 |
| SD0654 | 0.751 | 0.881 |
| SD0655 | 0.727 | 0.822 |
| SD0656 | 0.746 | 0.839 |
| SD0657 | 0.849 | 0.842 |
| SD0658 | 0.835 | 0.796 |
| SD0659 | 0.972 | 0.830 |
| SD0660 | 0.772 | 0.672 |
| SD0661 | 0.883 | 0.918 |
| SD0662 | 0.934 | 0.952 |
| SD0663 | 0.974 | 0.891 |
| SD0664 | 0.939 | 0.936 |
| SD0665 | 1.116 | 0.919 |
| SD0666 | 0.924 | 0.954 |
| SD0667 | 0.780 | 0.744 |
| SD0668 | 0.795 | 0.726 |
| SD0669 | 0.819 | 0.754 |
| SD0670 | 0.856 | 0.830 |
| SD0671 | 0.844 | 0.758 |
| SD0672 | 0.978 | 0.952 |
| SD0673 | 0.860 | 0.845 |
| SD0674 | 0.526 | 0.566 |
| SD0675 | 0.661 | 0.961 |
| SD0676 | 0.690 | 0.916 |
| SD0677 | 0.672 | 0.939 |
| SD0678 | 0.821 | 0.973 |
| SD0679 | 0.943 | 0.952 |
| SD0680 | 1.018 | 0.991 |
| SD0681 | 0.561 | 0.580 |
| SD0682 | 0.777 | 0.688 |
| SD0683 | 0.654 | 0.639 |
| SD0684 | 0.691 | 0.622 |
| SD0685 | 0.518 | 0.555 |
| SD0686 | 0.661 | 0.738 |
| SD0687 | 0.722 | 0.644 |
| SD0688 | 0.416 | 0.385 |
| SD0689 | 0.571 | 0.870 |
| SD0690 | 0.697 | 0.946 |
| SD0691 | 0.616 | 0.840 |
| SD0692 | 0.644 | 0.850 |
| SD0693 | 0.781 | 0.733 |
| SD0694 | 1.022 | 0.902 |
| SD0695 | 0.458 | 0.448 |
| SD0696 | 0.500 | 0.455 |
| SD0697 | 0.454 | 0.444 |
| SD0698 | 0.497 | 0.467 |
| SD0699 | 0.369 | 0.416 |
| SD0700 | 0.622 | 0.552 |
| SD0701 | 0.542 | 0.528 |
| SD0702 | 0.301 | 0.423 |
| SD0703 | 0.376 | 0.367 |
| SD0704 | 0.373 | 0.334 |
| SD0705 | 0.315 | 0.347 |
| SD0706 | 0.339 | 0.351 |
| SD0707 | 0.245 | 0.263 |
| SD0708 | 0.572 | 0.703 |
| SD0709 | 0.313 | 0.484 |
| SD0710 | 0.297 | 0.431 |
| SD0711 | 0.284 | 0.397 |
| SD0712 | 0.300 | 0.471 |
| SD0713 | 0.297 | 0.417 |
| SD0714 | 0.300 | 0.438 |
| SD0715 | 0.280 | 0.430 |

### Example 5. In Vivo Analysis of RNAi Agent Efficacy in Transiently Transgenic and Transgenic Mice

[0141] A) Administration and sample collection. In order to evaluate the efficacy of LPA RNAi agents in vivo, transiently transgenic mice were used. At least 30 days prior to cholesterol-conjugated LPA RNAi agent administration, wild-type mice were injected by hydrodynamic tail vein injection with a plasmid containing the SEAP gene under the control of the mouse albumin promoter. LPA gene target sequences were cloned in the 3′ UTR of the plasmid. These mice are noted as SEAP-LPA HTV mice. Cholesterol-conjugated LPA RNAi agents were administered to mice using MLP delivery polymer on day 1 (WO 2012/083185, incorporated herein by reference; melittin was synthesized and modified with CDM-NAG to yield MLP delivery polymer as described therein). Each mouse received an intravenous (IV) injection into the tail vein of 200-250 μL solution containing a dose of LPA RNAi agent+MLP delivery polymer (1:1 w/w RNAi agent: MLP delivery polymer in most cases). In some experiments, LPA RNAi agents were directly conjugated to a delivery polymer. Polymer conjugated LPA RNAi agents were similarly injected into tail vein. The indicated LPA RNAi agent (Table 8B) was conjugated to a polyacrylate polymer, ARF1164-106A-5, having 54.4% ethoxy ethyl amino acrylate (EEAA) amine monomers and 45.6% propyl acrylate propyl monomers (MW 41962 g/mol, polymer synthesized as described in WO 2013/158141) and masked with 3× ACit-NAG, 6×ACit-PEG (polymer masked as described in WO 2012/092373 and PCT/US16/34512). Control serum (pre-treatment) samples were taken from the mice pre-injection on days −4, or −1. Post injection serum samples were taken from the mice days 4, 8, 15, 22, 29, 36, and 43. For some mice, samples were collected on day 3 or day 5, instead of day 4.

[0142] In additional experiments, LPA RNAi agents were evaluated in vivo using transiently transgenic mice expressing full length LPA. At least 30 days prior to cholesterol-targeted LPA RNAi agent administration, immune compromised (Nod.scid) mice were injected by hydrodynamic tail vein injection with a minicircle containing the LPA cDNA under the control of the mouse albumin promoter. These mice are noted as LPA mc HTV mice. Either cholesterol-targeted or NAG (also termed GalNAc)-conjugated LPA RNAi agents were administered to mice on day 1. For Cholesterol-targeted RNAi agents, each mouse received an intravenous (IV) injection into the tail vein of 200-250 μL solution containing a dose of RNAi agent+MLP delivery polymer (1:1 w/w RNAi agent:MLP delivery polymer). For NAG conjugated LPA RNAi agents, mice received a subcutaneous (SC) injection into the loose skin on the back between the shoulders of 300 μl solution containing a dose of the RNAi agent in buffered saline. For some sample, the LPA RNAi agent was administered either with or without MLP delivery peptide. RNAi agents delivered with MLP delivery peptide were administered by intravenous (IV) injection into the tail vein of 200-250 μL solution containing a dose of RNAi agent+MLP delivery polymer (1:2 w/w RNAi agent:MLP delivery polymer in most cases). Control serum (pre-treatment) samples were taken from the mice pre-injection on days −4, or −1. Post injection serum samples were taken from the mice days 4, 8, 15, 22, 29, 36, and 43. For some mice, samples were collected on day 3 or day 5, instead of day 4.

[0143] In further experiments, LPA RNAi agents were administered to apo(a) and Lp(a) transgenic mice (Frazer K A et al 1995, Nature Genetics 9:424-431). This mouse expresses human apo(a) from a YAC containing the full LPA gene (encoding apo(a) protein) with additional sequences both 5′ and 3′. Lp(a) mice were bred by crossing apo(a) YAC-containing mice to human apoB-100 expressing mice (Callow M J et al 1994, PNAS 91:2130-2134). Cholesterol-targeted RNAi agents and NAG conjugated RNAi agents were administered as described above. Control serum (pre-treatment) samples were taken from the mice pre-injection on day −1. Post injection serum samples were taken from the mice days 4, 8, 15, 22, 29, 36, 43, 50, 57 and 64.

[0144] B) LPA expression knockdown analyses. For SEAP-LPA HTV mice, SEAP protein levels in serum were monitored by assaying serum from the mice using Phospha-Light™, a chemiluminescent reporter gene assay system (Life Technologies). For normalization, SEAP level for each animal at a given time point was divided by the pre-treatment level of expression in that animal to determine the ratio of expression “normalized to pre-treatment”. Expression at a specific time point was then averaged amongst individuals within the group.

[0145] For LPA mc HTV mice and transgenic mice, human apo(a) protein levels in serum were monitored by assaying serum from mice using an ELISA for apo(a) (Abcam). For normalization, apo(a) level for each animal at a time point was divided by the pre-treatment level of expression in that animal (in this case at day 1) to determine the ratio of expression “normalized to day 1”. Expression at a specific time point was then normalized to the saline control group by dividing the “normalized to day 1” ratio for an individual animal by the mean “normalized to day 1” ratio of all mice in the saline control group. This resulted in expression for each time point normalized to that in the control group.

[0146] Lp(a) levels were determined on a Cobas Integra 400 (Roche Diagnostics) according to the manufacturer's recommendations. For normalization, apo(a) level for each animal at a time point was divided by the pre-treatment level of expression in that animal (in this case at day 1) to determine the ratio of expression “normalized to day 1”. Expression at a specific time point was then normalized to the saline control group by dividing the “normalized to day 1” ratio for an individual animal by the mean “normalized to day 1” ratio of all mice in the saline control group. This resulted in expression for each time point normalized to that in the control group.

TABLE 8A
Relative LPA levels in mouse following intravenous
administration of cholesterol-conjugated LPA RNAi
agents + MLP delivery polymer.

| | LPA RNAi | MLP | |
|---|---|---|---|
| Duplex ID | agent (mg/kg) | (mg/kg) | Relative LPA |
| AD01184 | 2 | 2 | 0.20 |
| AD01187 | 2 | 2 | 0.18 |
| AD01190 | 2 | 2 | 0.17 |
| AD01193 | 2 | 2 | 0.22 |
| AD01196 | 2 | 2 | 0.02 |
| AD01197 | 2 | 2 | 0.065 |
| AD01198 | 2 | 2 | 0.051 |
| AD01199 | 2 | 2 | 0.070 |
| AD01200 | 2 | 2 | 0.094 |
| AD01201 | 2 | 2 | 0.029 |
| AD01202 | 8 | 8 | 0.14 |
| AD01205 | 2 | 2 | 0.21 |
| AD01206 | 2 | 2 | 0.37 |
| AD01207 | 2 | 2 | 0.19 |
| AD01208 | 2 | 2 | 0.35 |
| AD01209 | 2 | 2 | 0.16 |
| AD01210 | 2 | 2 | 0.18 |
| AD01211 | 2 | 2 | 0.38 |
| AD01212 | 2 | 2 | 0.26 |
| AD01213 | 2 | 2 | 0.30 |
| AD02662 | 2 | 2 | 0.0010 |
| AD02663 | 2 | 2 | 0.010 |
| AD02664 | 2 | 2 | 0.0010 |

TABLE 8B
Relative LPA levels in mouse following intravenous
administration of delivery polymer-conjugated LPA RNAi agents.

| Duplex | LPA RNAi agent | |
|---|---|---|
| ID | (mg/kg) | Relative LPA |
| AD01462 | 0.5 | 0.38 |
| AD01463 | 0.5 | 0.41 |
| AD01466 | 0.5 | 0.33 |
| AD01467 | 0.5 | 0.46 |

TABLE 8C
Relative LPA levels in mouse following subcutaneous
administration of NAG-conjugated LPA RNAi agents.

| | LPA RNAi agent | |
|---|---|---|
| Duplex ID | (mg/kg) | Relative LPA |
| AD01529 | 10 | 0.068 |
| AD01530 | 10 | 0.43 |
| AD01531 | 10 | 0.62 |
| AD01532 | 10 | 0.18 |
| AD01533 | 10 | 0.30 |
| AD01534 | 10 | 0.44 |
| AD01765 | 10 | 0.14 |
| AD01766 | 10 | 0.52 |
| AD01767 | 10 | 0.51 |
| AD01768 | 10 | 0.15 |
| AD01769 | 10 | 0.56 |
| AD01770 | 10 | 0.29 |
| AD01772 | 10 | 0.25 |
| AD01773 | 10 | 0.28 |
| AD01774 | 10 | 0.24 |
| AD01780 | 10 | 0.34 |
| AD01804 | 10 | 0.68 |
| AD01976 | 10 | 0.27 |
| AD01977 | 10 | 0.27 |
| AD01978 | 10 | 0.53 |
| AD01979 | 10 | 0.044 |
| AD01980 | 10 | 0.087 |
| AD01981 | 10 | 0.074 |
| AD01982 | 10 | 0.066 |
| AD01983 | 10 | 0.078 |
| AD01984 | 10 | 0.036 |
| AD01985 | 10 | 0.0070 |
| AD01986 | 10 | 0.019 |
| AD01987 | 10 | 0.019 |
| AD01988 | 10 | 0.042 |
| AD01989 | 10 | 0.053 |
| AD01990 | 10 | 0.017 |
| AD02001 | 10 | 0.021 |
| AD02003 | 10 | 0.050 |
| AD02004 | 10 | 0.050 |
| AD02005 | 10 | 0.040 |
| AD02006 | 10 | 0.11 |
| AD02007 | 10 | 0.21 |
| AD02008 | 10 | 0.080 |
| AD02009 | 10 | 0.090 |
| AD02010 | 10 | 0.16 |
| AD02011 | 10 | 0.070 |
| AD02435 | 10 | 0.038 |
| AD02436 | 10 | 0.027 |
| AD02437 | 10 | 0.052 |
| AD02438 | 10 | 0.063 |
| AD02439 | 10 | 0.073 |
| AD02440 | 10 | 0.13 |
| AD02545 | 10 | 0.079 |
| AD02546 | 10 | 0.045 |
| AD02547 | 10 | 0.055 |
| AD02548 | 10 | 0.13 |
| AD02549 | 10 | 0.071 |
| AD02550 | 10 | 0.039 |
| AD02551 | 10 | 0.057 |
| AD02552 | 10 | 0.033 |
| AD02553 | 10 | 0.14 |
| AD02554 | 10 | 0.14 |
| AD02555 | 10 | 0.18 |
| AD02556 | 10 | 0.10 |
| AD02557 | 10 | 0.10 |
| AD02558 | 10 | 0.071 |
| AD02559 | 10 | 0.039 |
| AD02560 | 10 | 0.058 |
| AD02561 | 10 | 0.12 |
| AD02609 | 3 | 0.59 |
| AD02610 | 3 | 0.36 |
| AD02611 | 3 | 0.35 |
| AD02612 | 3 | 0.37 |
| AD02613 | 3 | 0.24 |
| AD02614 | 3 | 0.24 |
| AD02615 | 3 | 0.14 |
| AD02616 | 3 | 0.25 |
| AD02617 | 3 | 0.090 |
| AD02618 | 3 | 0.11 |
| AD02619 | 3 | 0.020 |
| AD02620 | 3 | 0.11 |
| AD02682 | 10 | 0.11 |
| AD02683 | 10 | 0.14 |
| AD02684 | 10 | 0.79 |
| AD02685 | 10 | 0.78 |
| AD02686 | 10 | 0.19 |
| AD02687 | 10 | 0.27 |
| AD02696 | 3 | 0.050 |
| AD02710 | 3 | 0.040 |
| AD02711 | 3 | 0.040 |
| AD02712 | 3 | 0.49 |
| AD02713 | 3 | 0.040 |
| AD02714 | 3 | 0.040 |
| AD02715 | 3 | 0.070 |
| AD02716 | 3 | 0.080 |
| AD02717 | 3 | 0.12 |
| AD02745 | 3 | 0.25 |
| AD02746 | 3 | 0.22 |
| AD02747 | 3 | 0.081 |
| AD02748 | 3 | 0.17 |
| AD02749 | 3 | 0.17 |
| AD02750 | 3 | 0.066 |
| AD02751 | 3 | 0.070 |
| AD02752 | 3 | 0.044 |
| AD02753 | 3 | 0.071 |
| AD02819 | 1 | 0.022 |
| AD02820 | 1 | 0.042 |
| AD02821 | 1 | 0.038 |
| AD02825 | 3 | 0.050 |
| AD02826 | 3 | 0.050 |
| AD02827 | 3 | 0.050 |
| AD02828 | 3 | 0.050 |
| AD02829 | 3 | 0.040 |
| AD02830 | 3 | 0.040 |
| AD02831 | 3 | 0.030 |
| AD02832 | 3 | 0.030 |
| AD02841 | 3 | 0.061 |
| AD02842 | 3 | 0.16 |
| AD02843 | 3 | 0.10 |
| AD02844 | 3 | 0.11 |
| AD02845 | 3 | 0.22 |
| AD02846 | 3 | 0.16 |
| AD02847 | 3 | 0.066 |
| AD02848 | 3 | 0.055 |
| AD02849 | 3 | 0.083 |
| AD02850 | 3 | 0.042 |
| AD02851 | 3 | 0.063 |
| AD02852 | 3 | 0.11 |
| AD02907 | 10 | 0.10 |
| AD02908 | 10 | 0.11 |
| AD02909 | 10 | 0.049 |
| AD02910 | 10 | 0.23 |
| AD02911 | 10 | 0.20 |
| AD02912 | 10 | 0.10 |
| AD02913 | 10 | 0.070 |
| AD02914 | 10 | 0.050 |
| AD02915 | 10 | 0.10 |
| AD02916 | 10 | 0.090 |
| AD02917 | 10 | 0.060 |
| AD02918 | 10 | 0.020 |
| AD02919 | 10 | 0.030 |
| AD02920 | 10 | 0.050 |
| AD02921 | 10 | 0.040 |
| AD02922 | 10 | 0.080 |
| AD02923 | 10 | 0.040 |
| AD02924 | 10 | 0.050 |
| AD02925 | 10 | 0.030 |
| AD02926 | 10 | 0.17 |
| AD02927 | 10 | 0.31 |
| AD02928 | 10 | 0.081 |
| AD02929 | 10 | 0.065 |
| AD02930 | 10 | 0.15 |
| AD02931 | 10 | 0.13 |
| AD02932 | 10 | 0.11 |
| AD03049 | 3 | 0.20 |
| AD03050 | 3 | 0.087 |
| AD03051 | 3 | 0.070 |
| AD03052 | 3 | 0.080 |
| AD03053 | 3 | 0.23 |
| AD03054 | 3 | 0.050 |
| AD03058 | 3 | 0.27 |
| AD03059 | 3 | 0.22 |
| AD03060 | 3 | 0.31 |
| AD03061 | 3 | 0.16 |
| AD03062 | 3 | 0.20 |
| AD03063 | 3 | 0.13 |
| AD03064 | 3 | 0.21 |
| AD03065 | 3 | 0.085 |
| AD03066 | 3 | 0.10 |
| AD03067 | 3 | 0.094 |
| AD03068 | 3 | 0.17 |
| AD03069 | 3 | 0.077 |
| AD03070 | 3 | 0.36 |
| AD03071 | 3 | 0.043 |
| AD03072 | 3 | 0.031 |
| AD03073 | 3 | 0.019 |
| AD03074 | 3 | 0.016 |
| AD03075 | 3 | 0.062 |
| AD03114 | 1 | 0.33 |
| AD03115 | 1 | 0.30 |
| AD03116 | 1 | 0.21 |
| AD03117 | 1 | 0.14 |
| AD03118 | 1 | 0.30 |
| AD03119 | 1 | 0.10 |
| AD03120 | 1 | 0.080 |
| AD03121 | 1 | 0.14 |
| AD03122 | 1 | 0.14 |
| AD03123 | 1 | 0.34 |
| AD03156 | 1 | 0.084 |
| AD03157 | 1 | 0.016 |
| AD03158 | 1 | 0.037 |
| AD03159 | 1 | 0.63 |
| AD03272 | 1 | 0.13 |
| AD03273 | 1 | 0.20 |
| AD03274 | 1 | 0.21 |
| AD03275 | 1 | 0.15 |
| AD03276 | 1 | 0.11 |
| AD03277 | 1 | 0.13 |
| AD03278 | 1 | 0.13 |
| AD03279 | 1 | 0.21 |
| AD03341 | 1 | 0.13 |
| AD03421 | 1 | 0.29 |
| AD03430 | 1 | 0.12 |
| AD03432 | 1 | 0.16 |
| AD03434 | 1 | 0.11 |
| AD03436 | 1 | 0.21 |
| AD03438 | 1 | 0.25 |
| AD03440 | 1 | 0.21 |
| AD03460 | 1 | 0.090 |
| AD03462 | 1 | 0.40 |
| AD03495 | 1 | 0.28 |
| AD03536 | 1 | 0.14 |
| AD03538 | 0.5 | 0.26 |
| AD03539 | 0.5 | 0.21 |
| AD03540 | 1 | 0.15 |
| AD03541 | 0.5 | 0.10 |
| AD03542 | 1 | 0.94 |
| AD03547 | 1 | 0.19 |
| AD03548 | 1 | 0.73 |
| AD03549 | 1 | 0.29 |
| AD03573 | 1 | 0.15 |
| AD03574 | 1 | 0.15 |
| AD03575 | 1 | 0.13 |
| AD03576 | 1 | 0.18 |
| AD03577 | 0.5 | 0.18 |
| AD03578 | 0.5 | 0.38 |
| AD03579 | 0.5 | 0.53 |
| AD03603 | 1 | 0.083 |
| AD03604 | 1 | 0.091 |
| AD03605 | 1 | 0.19 |
| AD03608 | 1 | 0.18 |
| AD03609 | 1 | 0.16 |
| AD03610 | 1 | 0.23 |
| AD03611 | 1 | 0.40 |
| AD03612 | 1 | 0.21 |
| AD03629 | 1 | 0.11 |
| AD03668 | 1 | 0.070 |
| AD03705 | 0.5 | 0.11 |
| AD03707 | 0.5 | 0.11 |
| AD03720 | 0.5 | 0.14 |
| AD03721 | 0.5 | 0.094 |
| AD03722 | 0.5 | 0.19 |
| AD03723 | 0.5 | 0.10 |
| AD03765 | 1 | 0.080 |
| AD03771 | 1 | 0.10 |
| AD03801 | 1 | 0.15 |
| AD03802 | 1 | 0.18 |
| AD03844 | 1 | 0.17 |
| AD03845 | 1 | 0.25 |
| AD03848 | 1 | 0.10 |
| AD03850 | 1 | 0.052 |
| AD03851 | 1 | 0.076 |
| AD03852 | 1 | 0.13 |
| AD03853 | 1 | 0.081 |
| AD03854 | 1 | 0.21 |
| AD03856 | 1 | 0.32 |
| AD03859 | 1 | 0.15 |
| AD03862 | 1 | 0.12 |
| AD03863 | 1 | 0.12 |
| AD03921 | 1 | 0.17 |
| AD03922 | 1 | 0.057 |
| AD03923 | 1 | 0.066 |
| AD03924 | 1 | 0.14 |
| AD03931 | 1 | 0.34 |
| AD03932 | 1 | 0.15 |
| AD03933 | 1 | 0.34 |
| AD03424 | 1 | 0.15 |
| AD03425 | 1 | 0.21 |
| AD03426 | 1 | 0.21 |
| AD03427 | 1 | 0.19 |
| AD03428 | 1 | 0.18 |
| AD03760 | 0.5 | 0.21 |
| AD03762 | 0.5 | 0.17 |
| AD03763 | 0.5 | 0.21 |
| AD03764 | 0.5 | 0.28 |
| AD03766 | 0.5 | 0.065 |
| AD03847 | 1 | 0.15 |
| AD04110 | 1 | 0.070 |

### Example 6. In Vivo Screening of LPA RNAi Agents and Time Course of SEAP Knockdown

[0147] Cholesterol-conjugated LPA RNAi agents were administered to transiently transgenic mice as described above. Each mouse received a single intravenous (IV) dose of 8 mg/kg of LPA RNAi agent with 8 mg/kg of MLP delivery polymer. SEAP protein levels in serum were monitored for up to 36 days. Knockdown levels and duration of response are shown in Table 9. A decrease in SEAP serum protein level of greater than 85% was obtained following administration of all LPA RNAi agents tested; with all but two LPA RNAi agents tested showing greater than 99.4% knockdown. AD01196 and AD01199 showed >95% knockdown at day 36.

### Example 7. In Vivo Screening LPA RNAi Agents and Time Course of LPA Knockdown at Lower LPA RNAi Agent Doses

[0148] Cholesterol-conjugated LPA RNAi agents were administered to transiently transgenic mice as described above. Each mouse received a single intravenous (IV) dose of 2 mg/kg of LPA RNAi agent with 2 mg/kg of MLP delivery polymer. SEAP protein levels in serum were monitored for up to 43 days (Table 10).

### Example 8. In Vivo Testing of LPA RNAi Agents in Apo(a) Transgenic (Tg) Mice

[0149] AD01196 was administered to mice as described above. Each mouse received a single intravenous (IV) dose of either 2 mg/kg of LPA RNAi agent with 2 mg/kg of MLP delivery polymer or saline. Human apo(a) (apo(a)) levels in serum were monitored for up to 64 days (Table 11). At day 15, animals in the saline group received a single IV dose of 2 mg/kg of a control mouse Factor VII (F7) RNAi agent with 2 mg/kg of MLP delivery polymer. At day 22, F7 levels were measured in all animals. F7 activity was knocked down by 99% 7 days post dosing, with no effect on serum apo(a) levels. AD01196 showed >3 log 10 knockdown of apo(a) levels at nadir, with >80% knockdown observed after 3 weeks (Table 11).

TABLE 9
Serum SEAP protein levels in SEAP-LPA HTV mice following administration of 8 mg/kg chol-RNAi
agents with 8 mg/kg MLP delivery peptide. SEAP levels were normalized to day −1 and saline control.

| | Day −1 | | Day 4 | | Day 8 | | Day 15 | | Day 22 | | Day 29 | | Day 36 | |
|---|---|---|---|---|---|---|---|---|---|---|---|---|---|---|
| Treatment | Ave | SD | Ave | SD | Ave | SD | Ave | SD | Ave | SD | Ave | SD | Ave | SD |
| Saline | 1.00 | 0.24 | 1.00 | 0.34 | 1.00 | 0.13 | 1.00 | 0.33 | 1.00 | 0.09 | 1.00 | 0.18 | 1.00 | 0.44 |
| AD01184 | 1.00 | 0.39 | 0.27 | 0.10 | 0.15 | 0.06 | 0.01 | 0.00 | 0.07 | 0.04 | 0.43 | 0.39 | 0.98 | 0.73 |
| AD01187 | 1.00 | 0.53 | 0.24 | 0.15 | 0.13 | 0.10 | 0.00 | 0.00 | 0.01 | 0.01 | 0.08 | 0.06 | 0.56 | 0.47 |
| AD01190 | 1.00 | 0.77 | 0.26 | 0.20 | 0.14 | 0.11 | 0.00 | 0.00 | 0.00 | 0.00 | 0.00 | 0.00 | 0.02 | 0.01 |
| AD01193 | 1.00 | 0.99 | 0.25 | 0.26 | 0.15 | 0.17 | 0.01 | 0.01 | 0.00 | 0.00 | 0.01 | 0.01 | 0.02 | 0.01 |
| AD01196 | 1.00 | 0.59 | 0.24 | 0.13 | 0.14 | 0.08 | 0.00 | 0.00 | 0.00 | 0.00 | 0.01 | 0.01 | 0.04 | 0.03 |
| AD01199 | 1.00 | 0.52 | 0.23 | 0.15 | 0.13 | 0.10 | 0.00 | 0.00 | 0.00 | 0.00 | 0.01 | 0.00 | 0.04 | 0.02 |
| AD01202 | 1.00 | 0.93 | 0.25 | 0.24 | 0.17 | 0.16 | 0.14 | 0.12 | 0.56 | 0.55 | 0.78 | 0.66 | 2.09 | 2.00 |

TABLE 10
Serum SEAP protein levels in SEAP-LPA HTV mice following administration of 2 mg/kg chol-RNAi
agents with 2 mg/kg MLP delivery peptide. SEAP levels were normalized to day −1 and saline control.

| | Day −4 | | Day 4 | | Day 9 | | Day 15 | | Day 22 | | Day 29 | | Day 36 | | Day 43 | |
|---|---|---|---|---|---|---|---|---|---|---|---|---|---|---|---|---|
| Treatment | Ave. | SD | Ave. | SD | Ave. | SD | Ave. | SD | Ave. | SD | Ave. | SD | Ave. | SD | Ave. | SD |
| Saline | 1.00 | 0.00 | 1.00 | 0.72 | 1.00 | 0.72 | 1.00 | 0.71 | 1.00 | 0.43 | 1.00 | 0.79 | 1.00 | 0.48 | 1.00 | 0.54 |
| AD01196 | 1.00 | 0.00 | 0.22 | 0.08 | 0.05 | 0.05 | 0.02 | 0.01 | 0.13 | 0.04 | 0.36 | 0.12 | 0.69 | 0.08 | 1.39 | 0.91 |
| AD01199 | 1.00 | 0.00 | 0.27 | 0.28 | 0.07 | 0.06 | 0.17 | 0.17 | 0.59 | 0.51 | 0.74 | 0.74 | 0.83 | 0.82 | 1.01 | 0.58 |
| AD01205 | 1.00 | 0.00 | 0.21 | 0.13 | 0.31 | 0.23 | 0.45 | 0.21 | 1.33 | 0.68 | 1.11 | 0.82 | 1.55 | 1.30 | 1.79 | 1.09 |
| AD01208 | 1.00 | 0.00 | 0.43 | 0.20 | 0.35 | 0.15 | 0.68 | 0.19 | 1.45 | 0.44 | 1.32 | 0.26 | 1.39 | 0.52 | 0.99 | 0.12 |
| AD01211 | 1.00 | 0.00 | 0.38 | 0.14 | 0.53 | 0.20 | 0.94 | 0.38 | 1.96 | 0.93 | 1.05 | 0.27 | 1.44 | 0.38 | 0.93 | 0.28 |
| AD01184 | 1.00 | 0.00 | 0.26 | 0.07 | 0.20 | 0.05 | 0.61 | 0.17 | 1.28 | 0.14 | 1.21 | 0.51 | 1.39 | 0.80 | ND | ND |
| AD01187 | 1.00 | 0.00 | 0.37 | 0.18 | 0.09 | 0.07 | 0.18 | 0.17 | 0.86 | 0.84 | 0.77 | 0.33 | 1.80 | 0.36 | ND | ND |
| AD01190 | 1.00 | 0.00 | 0.26 | 0.08 | 0.17 | 0.07 | 0.36 | 0.13 | 1.16 | 0.37 | 1.39 | 0.69 | 1.96 | 1.64 | ND | ND |
| AD01193 | 1.00 | 0.00 | 0.39 | 0.27 | 0.22 | 0.33 | 0.32 | 0.37 | 0.67 | 0.58 | 0.84 | 0.46 | 1.27 | 0.23 | ND | ND |

TABLE 11
Serum apo(a) protein levels in apo(a) Tg mice following administration of 2 mg/kg
cholesterol-conjugated LPA RNAi agent with 2 mg/kg MLP delivery polymer.
Apo(a) levels were normalized to day −1 and saline control.

| | Day −1 | | Day 4 | | Day 8 | | Day 15 | | Day 22 | |
|---|---|---|---|---|---|---|---|---|---|---|
| Treatment | Ave | SD | Ave | SD | Ave | SD | Ave | SD | Ave | SD |
| Saline | 1.00 | 0.00 | 1.00 | 0.06 | 1.00 | 0.27 | 1.00 | 0.06 | 1.00 | 0.17 |
| AD01196 | 1.00 | 0.00 | 0.00 | 0.00 | 0.00 | 0.00 | 0.01 | 0.00 | 0.15 | 0.08 |

| | Day 29 | | Day 36 | | Day 43 | | Day 50 | |
|---|---|---|---|---|---|---|---|---|
| | Ave | SD | Ave | SD | Ave | SD | Ave | SD |
| Saline | 1.00 | 0.12 | 1.00 | 0.04 | 1.00 | 0.26 | 1.00 | 0.24 |
| AD01196 | 0.40 | 0.23 | 0.74 | 0.61 | 0.75 | 0.67 | 0.77 | 0.52 |

### Example 9. Apolipoprotein (a) (apo(a)) Knockdown in Non-Human Primates Following LPA RNAi Agent Delivery by MLP Delivery Polymer

[0150] MLP delivery polymer and LPA RNAi agent were made and combined in a pharmaceutically acceptable buffer as described above. On day 1, two cynomolgus macaque (Macaca fascicularis) primates (both male, 5.0 kg and 8.15 kg, respectively) were injected with 2 mg/kg ADO 1196+2 mg/kg MLP delivery polymer. For each injection, the LPA RNAi agent+MLP delivery polymer (2 ml/kg) was injected into the saphenous vein using a 22 to 25 gauge intravenous catheter. At the indicated time points (indicated in Table 12), blood samples were drawn and analyzed for apo(a) levels, lipid levels and toxicity markers. Blood was collected from the femoral vein and primates were fasted overnight before all blood collections. Blood tests for blood urea nitrogen (BUN), alanine transaminase (ALT), aspartate aminotransferase (AST), creatinine, total cholesterol (TC) and triglycerides (TG) were performed on an automated chemistry analyzer at Meriter laboratories. Blood tests for Lipoprotein (a) (Lp(a)) and Low density lipoprotein (LDL) were measured on an automated chemistry analyzer. Serum apo(a) levels were measured by ELISA. Significant knockdown of apo(a) was observed with an average maximum knockdown of 94.5% observed at day 22. Average maximum knockdown of Lp(a) was 91.5% observed at day 15 (FIG. 3). No dose-related toxicity was observed in treated animals.

TABLE 12
Serum apo(a) protein, Lipoprotein(a) (mg/dL), Low density Lipoprotein (LDL),
Total cholesterol, and triglyceride levels in cynomolgus macaque (Macaca fascicularis)
primates following administration of 2 mg/kg AD01196 with 2 mg/kg MLP delivery
polymer. Apo(a) levels were normalized to predose.

| | | | | | Low Density | | | | | |
|---|---|---|---|---|---|---|---|---|---|---|
| | Serum apo(a) | | Lipoprotein(a) | | Lipoprotein | | Total | | | |
| | protein | | levels | | calculated | | Cholesterol | | Triglycerides | |
| | levels | | (mg/dL) | | (mg/dL) | | (mg/dL) | | (mg/dL) | |
| | animal | animal | animal | animal | animal | animal | animal | animal | animal | animal |
| day | 1 | 2 | 1 | 2 | 1 | 2 | 1 | 2 | 1 | 2 |
| pre | 1.00 | 1.00 | 77.1 | 126.7 | 48.4 | 84.7 | 95 | 149 | 41 | 36 |
| 3 | 0.47 | 0.55 | 46.0 | 65.0 | 53.6 | 83.5 | 93 | 143 | 33 | 28 |
| 8 | 0.12 | 0.15 | 9.3 | 16.5 | 53.4 | 75.9 | 101 | 147 | 36 | 30 |
| 15 | 0.10 | 0.10 | 5.0 | 7.3 | 49.8 | 60.9 | 106 | 136 | 79 | 34 |
| 22 | 0.05 | 0.06 | 7.9 | 10.3 | 47.5 | 63.9 | 97 | 136 | 34 | 36 |
| 29 | 0.08 | 0.11 | 13.4 | 27.0 | 55.7 | 47.5 | 101 | 116 | 20 | 36 |
| 36 | 0.15 | 0.25 | 22.2 | 50.6 | 56.8 | 73.1 | — | — | — | — |
| 43 | 0.19 | 0.23 | 31.4 | 45.5 | 53.8 | 55.7 | 103 | 138 | 29 | 39 |
| 50 | 0.27 | 0.29 | 46.1 | 67.3 | 52.3 | 70.9 | — | — | — | — |
| 57 | 0.27 | 0.3 | 52.7 | 69.7 | 52.1 | 78.6 | 104 | 157 | 34 | 39 |
| 64 | 0.33 | 0.31 | 68.4 | 73.7 | 52.4 | 75.8 | — | — | — | — |
| 71 | 0.50 | 0.4 | 76.8 | 78.6 | 62.4 | 75.0 | 104 | 149 | 43 | 47 |
| 85 | 0.31 | 0.34 | 63.1 | 75.4 | 50.3 | 68.8 | 102 | 145 | 41 | 49 |
| 99 | 0.27 | 0.29 | 67.9 | 78.8 | 58.7 | 72.5 | 102 | 150 | 42 | 52 |
| 120 | 0.36 | 0.37 | 91.7 | 119.4 | 53.4 | 79.8 | 100 | 154 | 43 | 51 |

TABLE 13
Urea Nitrogen, Creatinine, Alanine transaminase, and Aspartate aminotransferase
levels in cynomolgus macaque (Macaca fascicularis) primates following
administration of 2 mg/kg AD01196 with 2 mg/kg MLP delivery polymer.

| | Blood Urea | | | | Alanine | | Aspartate | |
|---|---|---|---|---|---|---|---|---|
| | Nitrogen | | Creatinine | | transaminase | | aminotransferase | |
| | (mg/dL) | | (mg/dL) | | (U/L) | | (U/L) | |
| day | animal 1 | animal 2 | animal 1 | animal 2 | animal 1 | animal 2 | animal 1 | animal 2 |
| predose | 16 | 16 | 0.79 | 0.70 | 37 | 32 | 32 | 33 |
| 3 | 11 | 14 | 0.70 | 0.61 | 40 | 42 | 33 | 35 |
| 8 | 14 | 13 | 0.78 | 0.58 | 33 | 38 | 25 | 31 |
| 15 | 15 | 15 | 0.67 | 0.59 | 51 | 35 | 47 | 32 |
| 22 | 15 | 15 | 0.8 | 0.55 | 47 | 35 | 29 | 30 |
| 29 | 12 | 12 | 0.61 | 0.59 | 30 | 31 | 23 | 36 |
| 36 | — | — | — | — | — | — | — | — |
| 43 | 12 | 15 | 0.64 | 0.58 | 29 | 29 | 25 | 30 |
| 50 | — | — | — | — | — | — | — | — |
| 57 | 14 | 15 | 0.72 | 0.64 | 32 | 35 | 28 | 31 |
| 64 | — | — | — | — | — | — | — | — |
| 71 | 14 | 15 | 0.73 | 0.69 | 36 | 35 | 29 | 33 |
| 85 | 14 | 15 | 0.60 | 0.70 | 126 | 41 | 51 | 40 |
| 99 | 15 | 18 | 0.66 | 0.68 | 151 | 40 | 44 | 37 |
| 120 | 14 | 19 | 0.72 | 0.60 | 37 | 51 | 28 | 47 |

### Example 10. In Vivo Screening of NAG-Conjugated LPA RNAi Agents and Time Course of Knockdown

[0151] NAG-conjugated LPA RNAi agents were administered to transiently transgenic mice as described above. Each mouse received either single intravenous (IV) dose of 2 mg/kg of LPA RNAi agent with 1 mg/kg of MLP delivery polymer, or a single subcutaneous (SC) dose of 10 mg/kg of the NAG-conjugated LPA RNAi agent. SEAP protein levels in serum were monitored for up to 22 days. Knockdown levels and duration of response are shown in Tables 14-15. AD01529, AD01532 and AD01533 showed ≥85% knockdown of SEAP levels following IV administration with MLP deliver polymer, and ≥60% maximum knockdown of SEAP levels following SC administration of the NAG-conjugated LPA RNAi agent alone.

TABLE 14
Serum SEAP protein levels in SEAP-LPA HTV mice following SC
administration of 10 mg/kg NAG-conjugated LPA RNAi agents.
SEAP levels were normalized to day −1 and saline control.

| | Day −1 | | Day 4 | | Day 8 | | Day 15 | | Day 22 | |
|---|---|---|---|---|---|---|---|---|---|---|
| Treatment | Ave | SD | Ave | SD | Ave | SD | Ave | SD | Ave | SD |
| Saline | 1.00 | 0.00 | 1.00 | 0.14 | 1.00 | 0.14 | 1.00 | 0.66 | 1.00 | 0.27 |
| AD01529 | 1.00 | 0.00 | 0.45 | 0.07 | 0.36 | 0.03 | 0.60 | 0.08 | 0.90 | 0.37 |
| AD01530 | 1.00 | 0.00 | 0.46 | 0.15 | 0.43 | 0.10 | 0.79 | 0.26 | 0.79 | 0.32 |
| AD01531 | 1.00 | 0.00 | 0.64 | 0.13 | 0.62 | 0.06 | 0.99 | 0.28 | 1.17 | 0.29 |
| AD01532 | 1.00 | 0.00 | 0.41 | 0.12 | 0.37 | 0.11 | 0.99 | 0.34 | 1.33 | 0.11 |
| AD01533 | 1.00 | 0.00 | 0.40 | 0.03 | 0.22 | 0.08 | 0.37 | 0.15 | 0.63 | 0.13 |
| AD01534 | 1.00 | 0.00 | 0.65 | 0.19 | 0.44 | 0.19 | 0.74 | 0.30 | 1.17 | 0.55 |

TABLE 15
Serum SEAP protein levels in SEAP-LPA HTV mice following
IV administration of 1 mg/kg NAG-conjugated LPA RNAi
agents + 2 mg/kg MLP delivery polymer. SEAP levels were
normalized to day −1 and saline control.

| | Day −1 | | Day 4 | | Day 8 | | Day 15 | | Day 22 | |
|---|---|---|---|---|---|---|---|---|---|---|
| Treatment | Ave | SD | Ave | SD | Ave | SD | Ave | SD | Ave | SD |
| Saline | 1.00 | 0.00 | 1.00 | 0.33 | 1.00 | 0.46 | 1.00 | 0.21 | 1.00 | 0.39 |
| F7 Control | 1.00 | 0.00 | 0.61 | 0.05 | 0.71 | 0.45 | 1.25 | 0.44 | 1.05 | 0.49 |
| AD01529 | 1.00 | 0.00 | 0.25 | 0.04 | 0.15 | 0.08 | 0.47 | 0.24 | 0.81 | 0.40 |
| AD01530 | 1.00 | 0.00 | 0.26 | 0.06 | 0.28 | 0.19 | 0.78 | 0.60 | 1.06 | 0.63 |
| AD01531 | 1.00 | 0.00 | 0.22 | 0.07 | 0.26 | 0.06 | 0.72 | 0.21 | 1.04 | 0.12 |
| AD01532 | 1.00 | 0.00 | 0.18 | 0.05 | 0.06 | 0.03 | 0.13 | 0.08 | 0.29 | 0.18 |
| AD01533 | 1.00 | 0.00 | 0.21 | 0.04 | 0.13 | 0.06 | 0.32 | 0.15 | 0.67 | 0.28 |
| AD01534 | 1.00 | 0.00 | 0.17 | 0.04 | 0.22 | 0.06 | 0.66 | 0.24 | 0.94 | 0.24 |

### Example 11. In Vivo Screening of Modified NAG-Conjugated LPA RNAi Agents and Time Course of Knockdown

[0152] The indicated NAG-conjugated LPA RNAi agents were administered to SEAP-LPA HTV mice as described above. Each mouse received a single subcutaneous (SC) dose of 10 mg/kg of the NAG-conjugated LPA RNAi agent. SEAP protein levels in serum were monitored for up to 22 days. Knockdown levels and duration of response are shown in Tables 16-17. AD01765 and AD01768 showed 89% knockdown activity.

TABLE 16
Serum SEAP protein levels in SEAP-LPA HTV mice following
SC administration of 10 mg/kg NAG-conjugated LPA RNAi
agent. SEAP levels were normalized to day −1 and saline control.

| | Day −1 | | Day 3 | | Day 8 | | Day 15 | | Day 22 | |
|---|---|---|---|---|---|---|---|---|---|---|
| Treatment | Ave | SD | Ave | SD | Ave | SD | Ave | SD | Ave | SD |
| Saline | 1.00 | 0.00 | 1.00 | 0.16 | 1.00 | 0.16 | 1.00 | 0.28 | 1.00 | 0.24 |
| AD01533 | 1.00 | 0.00 | 0.41 | 0.08 | 0.22 | 0.02 | 0.47 | 0.20 | 0.66 | 0.29 |
| AD01772 | 1.00 | 0.00 | 0.46 | 0.13 | 0.18 | 0.00 | 0.34 | 0.09 | 0.61 | 0.14 |
| AD01773 | 1.00 | 0.00 | 0.47 | 0.08 | 0.20 | 0.08 | 0.45 | 0.15 | 0.83 | 0.12 |
| AD01774 | 1.00 | 0.00 | 0.49 | 0.09 | 0.18 | 0.03 | 0.44 | 0.13 | 0.68 | 0.08 |
| AD01780 | 1.00 | 0.00 | 0.52 | 0.13 | 0.25 | 0.09 | 0.44 | 0.26 | 0.65 | 0.37 |

TABLE 17
Serum SEAP protein levels in SEAP-LPA HTV mice following
SC administration of 10 mg/kg NAG-conjugated LPA RNAi agent.
SEAP levels were normalized to day −1 and saline control.

| | Day −1 | | Day 3 | | Day 8 | | Day 15 | | Day 22 | |
|---|---|---|---|---|---|---|---|---|---|---|
| Treatment | Ave | SD | Ave | SD | Ave | SD | Ave | SD | Ave | SD |
| Saline | 1.00 | 0.00 | 1.00 | 0.27 | 1.00 | 0.73 | 1.00 | 0.87 | 1.00 | 0.80 |
| AD01532 | 1.00 | 0.00 | 0.42 | 0.19 | 0.35 | 0.21 | 0.85 | 0.25 | 1.27 | 0.57 |
| AD01765 | 1.00 | 0.00 | 0.35 | 0.02 | 0.11 | 0.08 | 0.25 | 0.14 | 0.47 | 0.19 |
| AD01766 | 1.00 | 0.00 | 0.52 | 0.10 | 0.36 | 0.09 | 1.05 | 0.13 | 1.15 | 0.08 |
| AD01767 | 1.00 | 0.00 | 0.49 | 0.03 | 0.44 | 0.05 | 1.43 | 0.23 | 1.33 | 0.71 |
| AD01768 | 1.00 | 0.00 | 0.34 | 0.15 | 0.11 | 0.07 | 0.39 | 0.13 | 0.76 | 0.19 |
| AD01769 | 1.00 | 0.00 | 0.54 | 0.17 | 0.46 | 0.14 | 1.32 | 0.12 | 1.38 | 0.37 |
| AD01770 | 1.00 | 0.00 | 0.41 | 0.07 | 0.20 | 0.10 | 0.80 | 0.52 | 1.04 | 0.67 |

### Example 12. In Vivo Testing of NAG-Conjugated LPA RNAi Agents in apo(a) Tg Mice

[0153] NAG-conjugated LPA RNAi agents were administered to apo(a) Tg mice as described above. Each mouse received a single subcutaneous (SC) dose of either 10 mg/kg of LPA RNAi agent or saline. Human apo(a) (apo(a)) levels in serum were monitored for up to 22 days (Table 18). AD01765 showed the largest knockdown of apo(a) levels at day 8 with 96% knockdown, and >74% knockdown observed 3 weeks after dosing.

TABLE 18
Serum apo(a) protein levels in apo(a) Tg mice following SC
administration of 10 mg/kg NAG-conjugated LPA RNAi agent.
Apo(a) levels were normalized to day −1 and saline control.

| | Day −1 | | Day 4 | | Day 8 | | Day 15 | | Day 22 | |
|---|---|---|---|---|---|---|---|---|---|---|
| Treatment | Ave | SD | Ave | SD | Ave | SD | Ave | SD | Ave | SD |
| Saline | 1.00 | 0.00 | 1.00 | 0.10 | 1.00 | 0.16 | 1.00 | 0.42 | 1.00 | 0.21 |
| AD01532 | 1.00 | 0.00 | 0.12 | 0.05 | 0.22 | 0.08 | 0.76 | 0.30 | 0.56 | 0.28 |
| AD01765 | 1.00 | 0.00 | 0.09 | 0.03 | 0.04 | 0.02 | 0.14 | 0.02 | 0.26 | 0.04 |
| AD01768 | 1.00 | 0.00 | 0.11 | 0.05 | 0.09 | 0.05 | 0.26 | 0.12 | 0.38 | 0.08 |

### Example 13. In Vivo Testing of NAG-Conjugates LPA RNAi Agents in LPA Mc HTV Mice

[0154] Indicated NAG-conjugated LPA RNAi agents were administered to LPA mc HTV mice as described above. Each mouse received a single subcutaneous (SC) dose of either 10 mg/kg of LPA RNAi agent or saline. Human apo(a) (apo(a)) levels in serum were analyzed at day 4 (Table 19). AD02001, AD01765 and AD01768 showed >90% knockdown at day 4.

TABLE 19
Serum apo(a) protein levels in LPA mc HTV mice following SC
administration of 10 mg/kg NAG-conjugated LPA RNAi agent.
Apo(a) levels were normalized to day −1 and saline control.

| | Prebleed | | Day 4 | |
|---|---|---|---|---|
| Treatment | Ave | SD | Ave | SD |
| saline | 1.00 | 0.00 | 1.00 | 0.12 |
| AD01765 | 1.00 | 0.00 | 0.05 | 0.02 |
| AD01768 | 1.00 | 0.00 | 0.07 | 0.01 |
| AD01804 | 1.00 | 0.00 | 0.68 | 0.16 |
| AD02001 | 1.00 | 0.00 | 0.06 | 0.03 |

### Example 14. Apolipoprotein (a) (apo(a)) Knockdown in Non-Human Primates Following LPA RNAi Agent Delivery by MLP Delivery Polymer

[0155] MLP delivery polymer and LPA RNAi agent were made and combined in a pharmaceutically acceptable buffer. On day 1 and day 71, two cynomolgus macaque (Macaca fascicularis) primates were injected with either 4 mg/kg AD01196+4 mg/kg MLP delivery polymer or 6 mg/kg AD01196+6 mg/kg MLP delivery polymer. For each injection, the LPA RNAi agent+MLP delivery polymer was injected into the saphenous vein using a 22 to 25 gauge intravenous catheter. At the indicated time points (FIG. 4), blood samples were drawn and analyzed for apo(a) levels, lipid levels and toxicity markers as previously described. Significant knockdown of apo(a) was observed after the first dose with an average maximum knockdown of 96% for 4 mg/kg dose on day 15, and 96% for 6 mg/kg dose observed at day 15. Average maximum knockdown of Lp(a) after the first dose was 98.5% for 4 mg/kg dose on day 29, and 98.5% for 6 mg/kg dose on day 22. No dose-related toxicity was observed in treated animals.

### Example 15. In Vivo Testing of NAG-Conjugated LPA RNAi Agents in Lp(a) Tg Mice-Dose Response

[0156] NAG-conjugated LPA RNAi agents were administered to Lp(a) Tg mice as described above. Each mouse received a single subcutaneous (SC) dose of either LPA RNAi agent at 0.5 mg/kg or 2 mg/kg dose levels or saline. Lp(a) levels in serum were monitored up to day 43 (FIG. 1, FIG. 2). All LPA RNAi agents showed dose-response with the higher doses showing greater knockdown with nadir between days 15 and 22.

### Example 16. Apolipoprotein (a) (apo(a)) Knockdown in Non-Human Primates Following apo(a) Specific LPA RNAi Agent Molecule Delivery

[0157] LPA RNAi agent was prepared in a pharmaceutically acceptable buffer as described herein for subcutaneous (SC) injection. On days 1, 7, and 15, two cynomolgus macaque (Macaca fascicularis) primates were injected subcutaneously with 3 mg/kg of AD02713, AD02819, AD02820, or AD02821. In addition, AD02819-treated monkeys were dosed again with 3 mg/kg of AD02819 on day 57 and day 85. Blood samples were drawn and analyzed for apo(a) levels, lipid levels and toxicity markers as previously described. Significant knockdown of Lp(a) was observed with an average maximum knockdown of 89% observed at day 43 for AD02713, 87% observed on day 36 for AD02819, 79% observed on day 36 for AD02820, and 95% observed on day 29 for AD02821 (FIG. 5). No dose-related toxicity was observed in treated animals over the time of the experiment.

### Example 17. Apolipoprotein (a) (apo(a)) Knockdown in Non-Human Primates Following LPA RNAi Agent Delivery

[0158] LPA RNAi agent was prepared in a pharmaceutically acceptable buffer as described herein for subcutaneous (SC) injection. On day 1, two cynomolgus macaque (Macaca fascicularis) primates were injected subcutaneously with 3 mg/kg of AD03272, AD03462, AD03549, AD03547, AD03668, AD03460, or AD03536. In addition, AD03460 and AD03536-treated monkeys were dosed again with 1 mg/kg of the respective LPA RNAi agent on day 48. Blood samples were drawn and analyzed for apo(a) levels, lipid levels and toxicity markers as previously described. Significant knockdown of Lp(a) was observed with an average maximum knockdown of 62% for AD03272 on day 15, 28% for AD03462 on day 15, 47% for AD03549 on day 29, 44% for AD03547 on day 15, 53% for AD03668 on day 22, 79% for AD03460 on day 29, and 71% for AD03536 on day 22 (FIG. 6). No dose-related toxicity was observed in treated animals over the time of the experiment.

### Example 18. Apolipoprotein (a) (apo(a)) Knockdown in Primate Following apo(a) Specific LPA RNAi Agent Molecule Delivery

[0159] LPA RNAi agent was made and combined in a pharmaceutically acceptable buffer as described above for subcutaneous (SQ) injection. On day 1, cynomolgus macaque (Macaca fascicularis) primates were injected with subcutaneously with saline or 2 mg/kg of AD03460, AD03536, AD03851, AD03853, or AD04110. Blood samples were drawn and analyzed for apo(a) levels, lipid levels and toxicity markers on days 8 and 15 as previously described. Lp(a) levels were normalized to average of three predose values.

TABLE 20
Lipoprotein(a) levels in cynomolgus macaque primates
following administration of either saline or 2 mg/kg
AD03460, AD03536, AD03851, AD03853 or AD04110.

| | Normalized Lp(a) | Normalized Lp(a) |
|---|---|---|
| | Day 8 | Day 8 |
| Saline | 1.01 ± 0.06 | 1.15 ± 0.07 |
| AD03460 | 0.68 ± 0.12 | 0.40 ± 0.13 |
| AD03536 | 0.54 ± 0.07 | 0.21 ± 0.06 |
| AD03581 | 0.41 ± 0.08 | 0.18 ± 0.08 |
| AD03583 | 0.50 ± 0.23 | 0.27 ± 0.17 |
| AD04110 | 0.59 ± 0.13 | 0.43 ± 0.10 |

The application's sequence listing, which the Patent Office published only in electronic form, follows.

SEQUENCE LISTING (1285 sequences)

SEQ ID NO: 1 - RNA, 21 nt, synthetic construct
  source 1..21: mol_type = other RNA
  modified_base 1: mod_base = OTHER; note = Thymine
  modified_base 20..21: mod_base = OTHER; note = Thymine
tcggcagtcccttctgcgttt

SEQ ID NO: 2 - RNA, 21 nt, synthetic construct
  source 1..21: mol_type = other RNA
  modified_base 1: mod_base = OTHER; note = Thymine
  modified_base 20..21: mod_base = OTHER; note = Thymine
tgtagcactcctgcacccctt

SEQ ID NO: 3 - RNA, 21 nt, synthetic construct
  source 1..21: mol_type = other RNA
  modified_base 1: mod_base = OTHER; note = Thymine
  modified_base 20..21: mod_base = OTHER; note = Thymine
taataaggggctgccacagtt

SEQ ID NO: 4 - RNA, 21 nt, synthetic construct
  source 1..21: mol_type = other RNA
  modified_base 1: mod_base = OTHER; note = Thymine
  modified_base 20..21: mod_base = OTHER; note = Thymine
ttaacaataaggggctgcctt

SEQ ID NO: 5 - RNA, 21 nt, synthetic construct
  source 1..21: mol_type = other RNA
  modified_base 1: mod_base = OTHER; note = Thymine
  modified_base 20..21: mod_base = OTHER; note = Thymine
tgtataacaataaggggcttt

SEQ ID NO: 6 - RNA, 21 nt, synthetic construct
  source 1..21: mol_type = other RNA
  modified_base 1: mod_base = OTHER; note = Thymine
  modified_base 20..21: mod_base = OTHER; note = Thymine
tcgtataacaataaggggctt

SEQ ID NO: 7 - RNA, 21 nt, synthetic construct
  source 1..21: mol_type = other RNA
  modified_base 1: mod_base = OTHER; note = Thymine
  modified_base 20..21: mod_base = OTHER; note = Thymine
tcgtctgagcattgtgtcatt

SEQ ID NO: 8 - RNA, 21 nt, synthetic construct
  source 1..21: mol_type = other RNA
  modified_base 1: mod_base = OTHER; note = Thymine
  modified_base 20..21: mod_base = OTHER; note = Thymine
tgcgtctgagcattgtgtctt

SEQ ID NO: 9 - RNA, 21 nt, synthetic construct
  source 1..21: mol_type = other RNA
  modified_base 1: mod_base = OTHER; note = Thymine
  modified_base 20..21: mod_base = OTHER; note = Thymine
ttgcgtctgagcattgtgttt

SEQ ID NO: 10 - RNA, 21 nt, synthetic construct
  source 1..21: mol_type = other RNA
  modified_base 1: mod_base = OTHER; note = Thymine
  modified_base 20..21: mod_base = OTHER; note = Thymine
ttctgcgtctgagcattgttt

SEQ ID NO: 11 - RNA, 21 nt, synthetic construct
  source 1..21: mol_type = other RNA
  modified_base 1: mod_base = OTHER; note = Thymine
  modified_base 20..21: mod_base = OTHER; note = Thymine
tggatctggatttcggcagtt

SEQ ID NO: 12 - RNA, 21 nt, synthetic construct
  source 1..21: mol_type = other RNA
  modified_base 1: mod_base = OTHER; note = Thymine
  modified_base 20..21: mod_base = OTHER; note = Thymine
tcaggatctggatttcggctt

SEQ ID NO: 13 - RNA, 21 nt, synthetic construct
  source 1..21: mol_type = other RNA
  modified_base 1: mod_base = OTHER; note = Thymine
  modified_base 20..21: mod_base = OTHER; note = Thymine
tcatctgagcatcgtgtcatt

SEQ ID NO: 14 - RNA, 21 nt, synthetic construct
  source 1..21: mol_type = other RNA
  modified_base 1: mod_base = OTHER; note = Thymine
  modified_base 20..21: mod_base = OTHER; note = Thymine
tgcatctgagcatcgtgtctt

SEQ ID NO: 15 - RNA, 21 nt, synthetic construct
  source 1..21: mol_type = other RNA
  modified_base 1: mod_base = OTHER; note = Thymine
  modified_base 20..21: mod_base = OTHER; note = Thymine
ttgcatctgagcatcgtgttt

SEQ ID NO: 16 - RNA, 21 nt, synthetic construct
  source 1..21: mol_type = other RNA
  modified_base 1: mod_base = OTHER; note = Thymine
  modified_base 20..21: mod_base = OTHER; note = Thymine
ttctgcatctgagcatcgttt

SEQ ID NO: 17 - RNA, 21 nt, synthetic construct
  source 1..21: mol_type = other RNA
  modified_base 1: mod_base = OTHER; note = Thymine
  modified_base 20..21: mod_base = OTHER; note = Thymine
taaagcctctaggcttggatt

SEQ ID NO: 18 - RNA, 21 nt, synthetic construct
  source 1..21: mol_type = other RNA
  modified_base 1: mod_base = OTHER; note = Thymine
  modified_base 20..21: mod_base = OTHER; note = Thymine
tgtaccccgggggtttccttt

SEQ ID NO: 19 - RNA, 21 nt, synthetic construct
  source 1..21: mol_type = other RNA
  modified_base 1: mod_base = OTHER; note = Thymine
  modified_base 20..21: mod_base = OTHER; note = Thymine
ttgtaccccgggggtttcctt

SEQ ID NO: 20 - RNA, 21 nt, synthetic construct
  source 1..21: mol_type = other RNA
  modified_base 1: mod_base = OTHER; note = Thymine
  modified_base 20..21: mod_base = OTHER; note = Thymine
tctgtaccccgggggtttctt

SEQ ID NO: 21 - RNA, 21 nt, synthetic construct
  source 1..21: mol_type = other RNA
  modified_base 1: mod_base = OTHER; note = Thymine
  modified_base 20..21: mod_base = OTHER; note = Thymine
ttccataatggtagtagcatt

SEQ ID NO: 22 - RNA, 21 nt, synthetic construct
  source 1..21: mol_type = other RNA
  modified_base 1: mod_base = OTHER; note = Thymine
  modified_base 20..21: mod_base = OTHER; note = Thymine
tgtccataatggtagtagctt

SEQ ID NO: 23 - RNA, 21 nt, synthetic construct
  source 1..21: mol_type = other RNA
  modified_base 1: mod_base = OTHER; note = Thymine
  modified_base 20..21: mod_base = OTHER; note = Thymine
tctctgtccataatggtagtt

SEQ ID NO: 24 - RNA, 21 nt, synthetic construct
  source 1..21: mol_type = other RNA
  modified_base 1: mod_base = OTHER; note = Thymine
  modified_base 20..21: mod_base = OTHER; note = Thymine
tcgactatgctggtgtggttt

SEQ ID NO: 25 - RNA, 21 nt, synthetic construct
  source 1..21: mol_type = other RNA
  modified_base 1: mod_base = OTHER; note = Thymine
  modified_base 20..21: mod_base = OTHER; note = Thymine
tccgactatgctggtgtggtt

SEQ ID NO: 26 - RNA, 21 nt, synthetic construct
  source 1..21: mol_type = other RNA
  modified_base 1: mod_base = OTHER; note = Thymine
  modified_base 20..21: mod_base = OTHER; note = Thymine
ttccgactatgctggtgtgtt

SEQ ID NO: 27 - RNA, 21 nt, synthetic construct
  source 1..21: mol_type = other RNA
  modified_base 1: mod_base = OTHER; note = Thymine
  modified_base 20..21: mod_base = OTHER; note = Thymine
tggtccgactatgctggtgtt

SEQ ID NO: 28 - RNA, 21 nt, synthetic construct
  source 1..21: mol_type = other RNA
  modified_base 1: mod_base = OTHER; note = Thymine
  modified_base 20..21: mod_base = OTHER; note = Thymine
ttttctggggtccgactattt

SEQ ID NO: 29 - RNA, 21 nt, synthetic construct
  source 1..21: mol_type = other RNA
  modified_base 1: mod_base = OTHER; note = Thymine
  modified_base 20..21: mod_base = OTHER; note = Thymine
tttttctggggtccgactatt

SEQ ID NO: 30 - RNA, 21 nt, synthetic construct
  source 1..21: mol_type = other RNA
  modified_base 1: mod_base = OTHER; note = Thymine
  modified_base 20..21: mod_base = OTHER; note = Thymine
tgcgaatctcagcatctggtt

SEQ ID NO: 31 - RNA, 21 nt, synthetic construct
  source 1..21: mol_type = other RNA
  modified_base 1: mod_base = OTHER; note = Thymine
  modified_base 20..21: mod_base = OTHER; note = Thymine
tccaagggcgaatctcagctt

SEQ ID NO: 32 - RNA, 21 nt, synthetic construct
  source 1..21: mol_type = other RNA
  modified_base 1: mod_base = OTHER; note = Thymine
  modified_base 20..21: mod_base = OTHER; note = Thymine
taccaagggcgaatctcagtt

SEQ ID NO: 33 - RNA, 21 nt, synthetic construct
  source 1..21: mol_type = other RNA
  modified_base 1: mod_base = OTHER; note = Thymine
  modified_base 20..21: mod_base = OTHER; note = Thymine
tcaccaagggcgaatctcatt

SEQ ID NO: 34 - RNA, 21 nt, synthetic construct
  source 1..21: mol_type = other RNA
  modified_base 1: mod_base = OTHER; note = Thymine
  modified_base 20..21: mod_base = OTHER; note = Thymine
tacaccaagggcgaatctctt

SEQ ID NO: 35 - RNA, 21 nt, synthetic construct
  source 1..21: mol_type = other RNA
  modified_base 1: mod_base = OTHER; note = Thymine
  modified_base 20..21: mod_base = OTHER; note = Thymine
tcctgacactgggatccattt

SEQ ID NO: 36 - RNA, 21 nt, synthetic construct
  source 1..21: mol_type = other RNA
  modified_base 1: mod_base = OTHER; note = Thymine
  modified_base 20..21: mod_base = OTHER; note = Thymine
ttgcaaggacacttgattctt

SEQ ID NO: 37 - RNA, 21 nt, synthetic construct
  source 1..21: mol_type = other RNA
  modified_base 1: mod_base = OTHER; note = Thymine
  modified_base 20..21: mod_base = OTHER; note = Thymine
tttgcaaggacacttgatttt

SEQ ID NO: 38 - RNA, 21 nt, synthetic construct
  source 1..21: mol_type = other RNA
  modified_base 1: mod_base = OTHER; note = Thymine
  modified_base 20..21: mod_base = OTHER; note = Thymine
tttgctccgttggtgcttctt

SEQ ID NO: 39 - RNA, 21 nt, synthetic construct
  source 1..21: mol_type = other RNA
  modified_base 1: mod_base = OTHER; note = Thymine
  modified_base 20..21: mod_base = OTHER; note = Thymine
taatgagcctcgataactctt

SEQ ID NO: 40 - RNA, 21 nt, synthetic construct
  source 1..21: mol_type = other RNA
  modified_base 1: mod_base = OTHER; note = Thymine
  modified_base 20..21: mod_base = OTHER; note = Thymine
tgaatgagcctcgataacttt

SEQ ID NO: 41 - RNA, 21 nt, synthetic construct
  source 1..21: mol_type = other RNA
  modified_base 1: mod_base = OTHER; note = Thymine
  modified_base 20..21: mod_base = OTHER; note = Thymine
tggataatattctgttgtctt

SEQ ID NO: 42 - RNA, 21 nt, synthetic construct
  source 1..21: mol_type = other RNA
  modified_base 1: mod_base = OTHER; note = Thymine
  modified_base 20..21: mod_base = OTHER; note = Thymine
tccatggtataacaccaagtt

SEQ ID NO: 43 - RNA, 21 nt, synthetic construct
  source 1..21: mol_type = other RNA
  modified_base 1: mod_base = OTHER; note = Thymine
  modified_base 20..21: mod_base = OTHER; note = Thymine
tgatccatggtataacacctt

SEQ ID NO: 44 - RNA, 21 nt, synthetic construct
  source 1..21: mol_type = other RNA
  modified_base 1: mod_base = OTHER; note = Thymine
  modified_base 20..21: mod_base = OTHER; note = Thymine
tattgggatccatggtatatt

SEQ ID NO: 45 - RNA, 21 nt, synthetic construct
  source 1..21: mol_type = other RNA
  modified_base 1: mod_base = OTHER; note = Thymine
  modified_base 20..21: mod_base = OTHER; note = Thymine
tcattgggatccatggtattt

SEQ ID NO: 46 - RNA, 21 nt, synthetic construct
  source 1..21: mol_type = other RNA
  modified_base 1: mod_base = OTHER; note = Thymine
  modified_base 20..21: mod_base = OTHER; note = Thymine
tacattgggatccatggtatt

SEQ ID NO: 47 - RNA, 21 nt, synthetic construct
  source 1..21: mol_type = other RNA
  modified_base 1: mod_base = OTHER; note = Thymine
  modified_base 20..21: mod_base = OTHER; note = Thymine
tgacattgggatccatggttt

SEQ ID NO: 48 - RNA, 21 nt, synthetic construct
  source 1..21: mol_type = other RNA
  modified_base 1: mod_base = OTHER; note = Thymine
  modified_base 20..21: mod_base = OTHER; note = Thymine
tgacattgtgtcaggttgctt

SEQ ID NO: 49 - RNA, 21 nt, synthetic construct
  source 1..21: mol_type = other RNA
  modified_base 1: mod_base = OTHER; note = Thymine
  modified_base 20..21: mod_base = OTHER; note = Thymine
tcactggacattgtgtcagtt

SEQ ID NO: 50 - RNA, 21 nt, synthetic construct
  source 1..21: mol_type = other RNA
  modified_base 1: mod_base = OTHER; note = Thymine
  modified_base 20..21: mod_base = OTHER; note = Thymine
tacttgattctgtcactggtt

SEQ ID NO: 51 - RNA, 21 nt, synthetic construct
  source 1..21: mol_type = other RNA
  modified_base 1: mod_base = OTHER; note = Thymine
  modified_base 20..21: mod_base = OTHER; note = Thymine
tgagaatgagcctcgataatt

SEQ ID NO: 52 - RNA, 21 nt, synthetic construct
  source 1..21: mol_type = other RNA
  modified_base 1: mod_base = OTHER; note = Thymine
  modified_base 20..21: mod_base = OTHER; note = Thymine
tccatttgggtagtattcttt

SEQ ID NO: 53 - RNA, 21 nt, synthetic construct
  source 1..21: mol_type = other RNA
  modified_base 1: mod_base = OTHER; note = Thymine
  modified_base 20..21: mod_base = OTHER; note = Thymine
tcaccatttgggtagtatttt

SEQ ID NO: 54 - RNA, 21 nt, synthetic construct
  source 1..21: mol_type = other RNA
  modified_base 1: mod_base = OTHER; note = Thymine
  modified_base 20..21: mod_base = OTHER; note = Thymine
tccaccatttgggtagtattt

SEQ ID NO: 55 - RNA, 21 nt, synthetic construct
  source 1..21: mol_type = other RNA
  modified_base 1: mod_base = OTHER; note = Thymine
  modified_base 20..21: mod_base = OTHER; note = Thymine
tataacaccaagggcgaattt

SEQ ID NO: 56 - RNA, 21 nt, synthetic construct
  source 1..21: mol_type = other RNA
  modified_base 1: mod_base = OTHER; note = Thymine
  modified_base 20..21: mod_base = OTHER; note = Thymine
tactgggatccatggtatatt

SEQ ID NO: 57 - RNA, 21 nt, synthetic construct
  source 1..21: mol_type = other RNA
  modified_base 1: mod_base = OTHER; note = Thymine
  modified_base 20..21: mod_base = OTHER; note = Thymine
tcactgggatccatggtattt

SEQ ID NO: 58 - RNA, 21 nt, synthetic construct
  source 1..21: mol_type = other RNA
  modified_base 1: mod_base = OTHER; note = Thymine
  modified_base 20..21: mod_base = OTHER; note = Thymine
taccaccgtgggagttgtgtt

SEQ ID NO: 59 - RNA, 21 nt, synthetic construct
  source 1..21: mol_type = other RNA
  modified_base 1: mod_base = OTHER; note = Thymine
  modified_base 20..21: mod_base = OTHER; note = Thymine
tcaagactgacatgttctttt

SEQ ID NO: 60 - RNA, 21 nt, synthetic construct
  source 1..21: mol_type = other RNA
  modified_base 1: mod_base = OTHER; note = Thymine
  modified_base 20..21: mod_base = OTHER; note = Thymine
tgggagttgtgaggacacttt

SEQ ID NO: 61 - RNA, 21 nt, synthetic construct
  source 1..21: mol_type = other RNA
  modified_base 1: mod_base = OTHER; note = Thymine
  modified_base 20..21: mod_base = OTHER; note = Thymine
ttctcaggtggtgcttgtttt

SEQ ID NO: 62 - RNA, 21 nt, synthetic construct
  source 1..21: mol_type = other RNA
  modified_base 1: mod_base = OTHER; note = Thymine
  modified_base 20..21: mod_base = OTHER; note = Thymine
tcacagggcttttctcaggtt

SEQ ID NO: 63 - RNA, 21 nt, synthetic construct
  source 1..21: mol_type = other RNA
  modified_base 1: mod_base = OTHER; note = Thymine
  modified_base 20..21: mod_base = OTHER; note = Thymine
tgatgccagtgtggtatcatt

SEQ ID NO: 64 - RNA, 21 nt, synthetic construct
  source 1..21: mol_type = other RNA
  modified_base 1: mod_base = OTHER; note = Thymine
  modified_base 20..21: mod_base = OTHER; note = Thymine
ttgatgccagtgtggtatctt

SEQ ID NO: 65 - RNA, 21 nt, synthetic construct
  source 1..21: mol_type = other RNA
  modified_base 1: mod_base = OTHER; note = Thymine
  modified_base 20..21: mod_base = OTHER; note = Thymine
tgacacctgattctgtttctt

SEQ ID NO: 66 - RNA, 21 nt, synthetic construct
  source 1..21: mol_type = other RNA
  modified_base 1: mod_base = OTHER; note = Thymine
  modified_base 20..21: mod_base = OTHER; note = Thymine
tggacacctgattctgttttt

SEQ ID NO: 67 - RNA, 21 nt, synthetic construct
  source 1..21: mol_type = other RNA
  modified_base 1: mod_base = OTHER; note = Thymine
  modified_base 20..21: mod_base = OTHER; note = Thymine
tctaggacacctgattctgtt

SEQ ID NO: 68 - RNA, 21 nt, synthetic construct
  source 1..21: mol_type = other RNA
  modified_base 1: mod_base = OTHER; note = Thymine
  modified_base 20..21: mod_base = OTHER; note = Thymine
tataaggggctgccacaggtt

SEQ ID NO: 69 - RNA, 21 nt, synthetic construct
  source 1..21: mol_type = other RNA
  modified_base 1: mod_base = OTHER; note = Thymine
  modified_base 20..21: mod_base = OTHER; note = Thymine
taacaataaggggctgccatt

SEQ ID NO: 70 - RNA, 21 nt, synthetic construct
  source 1..21: mol_type = other RNA
  modified_base 1: mod_base = OTHER; note = Thymine
  modified_base 20..21: mod_base = OTHER; note = Thymine
tgtccgactatgctggtgttt

SEQ ID NO: 71 - RNA, 21 nt, synthetic construct
  source 1..21: mol_type = other RNA
  modified_base 1: mod_base = OTHER; note = Thymine
  modified_base 20..21: mod_base = OTHER; note = Thymine
ttctcagcatctggattcctt

SEQ ID NO: 72 - RNA, 21 nt, synthetic construct
  source 1..21: mol_type = other RNA
  modified_base 1: mod_base = OTHER; note = Thymine
  modified_base 20..21: mod_base = OTHER; note = Thymine
tcgaatctcagcatctggatt

SEQ ID NO: 73 - RNA, 21 nt, synthetic construct
  source 1..21: mol_type = other RNA
  modified_base 1: mod_base = OTHER; note = Thymine
  modified_base 20..21: mod_base = OTHER; note = Thymine
taagggcgaatctcagcattt

SEQ ID NO: 74 - RNA, 21 nt, synthetic construct
  source 1..21: mol_type = other RNA
  modified_base 1: mod_base = OTHER; note = Thymine
  modified_base 20..21: mod_base = OTHER; note = Thymine
ttgacactgggatccatggtt

SEQ ID NO: 75 - RNA, 21 nt, synthetic construct
  source 1..21: mol_type = other RNA
  modified_base 1: mod_base = OTHER; note = Thymine
  modified_base 20..21: mod_base = OTHER; note = Thymine
tccgttggtgcttcttcagtt

SEQ ID NO: 76 - RNA, 21 nt, synthetic construct
  source 1..21: mol_type = other RNA
  modified_base 1: mod_base = OTHER; note = Thymine
  modified_base 20..21: mod_base = OTHER; note = Thymine
tcttgattctgtcactggatt

SEQ ID NO: 77 - RNA, 21 nt, synthetic construct
  source 1..21: mol_type = other RNA
  modified_base 1: mod_base = OTHER; note = Thymine
  modified_base 20..21: mod_base = OTHER; note = Thymine
tcaccgtgggagttgtgagtt

SEQ ID NO: 78 - RNA, 21 nt, synthetic construct
  source 1..21: mol_type = other RNA
  modified_base 1: mod_base = OTHER; note = Thymine
  modified_base 20..21: mod_base = OTHER; note = Thymine
ttctaggacacctgattcttt

SEQ ID NO: 79 - RNA, 21 nt, synthetic construct
  source 1..21: mol_type = other RNA
  modified_base 1: mod_base = OTHER; note = Thymine
  modified_base 20..21: mod_base = OTHER; note = Thymine
tagtctctaggacacctgatt

SEQ ID NO: 80 - RNA, 21 nt, synthetic construct
  source 1..21: mol_type = other RNA
  modified_base 1: mod_base = OTHER; note = Thymine
  modified_base 20..21: mod_base = OTHER; note = Thymine
tcaataaggggctgccacatt

SEQ ID NO: 81 - RNA, 21 nt, synthetic construct
  source 1..21: mol_type = other RNA
  modified_base 1: mod_base = OTHER; note = Thymine
  modified_base 20..21: mod_base = OTHER; note = Thymine
tctgcgtctgagcattgtgtt

SEQ ID NO: 82 - RNA, 21 nt, synthetic construct
  source 1..21: mol_type = other RNA
  modified_base 1: mod_base = OTHER; note = Thymine
  modified_base 20..21: mod_base = OTHER; note = Thymine
tacaggatctggatttcggtt

SEQ ID NO: 83 - RNA, 21 nt, synthetic construct
  source 1..21: mol_type = other RNA
  modified_base 1: mod_base = OTHER; note = Thymine
  modified_base 20..21: mod_base = OTHER; note = Thymine
tccgggggtttcctcagtctt

SEQ ID NO: 84 - RNA, 21 nt, synthetic construct
  source 1..21: mol_type = other RNA
  modified_base 1: mod_base = OTHER; note = Thymine
  modified_base 20..21: mod_base = OTHER; note = Thymine
ttgtccataatggtagtagtt

SEQ ID NO: 85 - RNA, 21 nt, synthetic construct
  source 1..21: mol_type = other RNA
  modified_base 1: mod_base = OTHER; note = Thymine
  modified_base 20..21: mod_base = OTHER; note = Thymine
ttctgtccataatggtagttt

SEQ ID NO: 86 - RNA, 21 nt, synthetic construct
  source 1..21: mol_type = other RNA
  modified_base 1: mod_base = OTHER; note = Thymine
  modified_base 20..21: mod_base = OTHER; note = Thymine
tactctgtccataatggtatt

SEQ ID NO: 87 - RNA, 21 nt, synthetic construct
  source 1..21: mol_type = other RNA
  modified_base 1: mod_base = OTHER; note = Thymine
  modified_base 20..21: mod_base = OTHER; note = Thymine
taactctgtccataatggttt

SEQ ID NO: 88 - RNA, 21 nt, synthetic construct
  source 1..21: mol_type = other RNA
  modified_base 1: mod_base = OTHER; note = Thymine
  modified_base 20..21: mod_base = OTHER; note = Thymine
tgggcgaatctcagcatcttt

SEQ ID NO: 89 - RNA, 21 nt, synthetic construct
  source 1..21: mol_type = other RNA
  modified_base 1: mod_base = OTHER; note = Thymine
  modified_base 20..21: mod_base = OTHER; note = Thymine
tagggcgaatctcagcatctt

SEQ ID NO: 90 - RNA, 21 nt, synthetic construct
  source 1..21: mol_type = other RNA
  modified_base 1: mod_base = OTHER; note = Thymine
  modified_base 20..21: mod_base = OTHER; note = Thymine
taacaccaagggcgaatcttt

SEQ ID NO: 91 - RNA, 21 nt, synthetic construct
  source 1..21: mol_type = other RNA
  modified_base 1: mod_base = OTHER; note = Thymine
  modified_base 20..21: mod_base = OTHER; note = Thymine
taggacacttgattctgtctt

SEQ ID NO: 92 - RNA, 21 nt, synthetic construct
  source 1..21: mol_type = other RNA
  modified_base 1: mod_base = OTHER; note = Thymine
  modified_base 20..21: mod_base = OTHER; note = Thymine
tggaccaagactgacatgttt

SEQ ID NO: 93 - RNA, 21 nt, synthetic construct
  source 1..21: mol_type = other RNA
  modified_base 1: mod_base = OTHER; note = Thymine
  modified_base 20..21: mod_base = OTHER; note = Thymine
tggtcaggccaccatttggtt

SEQ ID NO: 94 - RNA, 21 nt, synthetic construct
  source 1..21: mol_type = other RNA
  modified_base 1: mod_base = OTHER; note = Thymine
  modified_base 20..21: mod_base = OTHER; note = Thymine
tatccatggtataacaccatt

SEQ ID NO: 95 - RNA, 21 nt, synthetic construct
  source 1..21: mol_type = other RNA
  modified_base 1: mod_base = OTHER; note = Thymine
  modified_base 20..21: mod_base = OTHER; note = Thymine
tgggatccatggtataacatt

SEQ ID NO: 96 - RNA, 21 nt, synthetic construct
  source 1..21: mol_type = other RNA
  modified_base 1: mod_base = OTHER; note = Thymine
  modified_base 20..21: mod_base = OTHER; note = Thymine
ttggacattgtgtcaggtttt

SEQ ID NO: 97 - RNA, 21 nt, synthetic construct
  source 1..21: mol_type = other RNA
  modified_base 1: mod_base = OTHER; note = Thymine
  modified_base 20..21: mod_base = OTHER; note = Thymine
tattctgtcactggacatttt

SEQ ID NO: 98 - RNA, 21 nt, synthetic construct
  source 1..21: mol_type = other RNA
  modified_base 1: mod_base = OTHER; note = Thymine
  modified_base 20..21: mod_base = OTHER; note = Thymine
tggtgcttgttcagaaacatt

SEQ ID NO: 99 - RNA, 21 nt, synthetic construct
  source 1..21: mol_type = other RNA
  modified_base 1: mod_base = OTHER; note = Thymine
  modified_base 20..21: mod_base = OTHER; note = Thymine
tggagaatgagcctcgatatt

SEQ ID NO: 100 - RNA, 21 nt, synthetic construct
  source 1..21: mol_type = other RNA
  modified_base 1: mod_base = OTHER; note = Thymine
  modified_base 20..21: mod_base = OTHER; note = Thymine
tgtggagaatgagcctcgatt

SEQ ID NO: 101 - RNA, 21 nt, synthetic construct
  source 1..21: mol_type = other RNA
  modified_base 1: mod_base = OTHER; note = Thymine
  modified_base 20..21: mod_base = OTHER; note = Thymine
tccgtgggagttgtgaggatt

SEQ ID NO: 102 - RNA, 21 nt, synthetic construct
  source 1..21: mol_type = other RNA
  modified_base 1: mod_base = OTHER; note = Thymine
  modified_base 20..21: mod_base = OTHER; note = Thymine
tggaccaccgtgggagttgtt

SEQ ID NO: 103 - RNA, 21 nt, synthetic construct
  source 1..21: mol_type = other RNA
  modified_base 1: mod_base = OTHER; note = Thymine
  modified_base 20..21: mod_base = OTHER; note = Thymine
ttgcttgttcagaaggagctt

SEQ ID NO: 104 - RNA, 21 nt, synthetic construct
  source 1..21: mol_type = other RNA
  modified_base 1: mod_base = OTHER; note = Thymine
  modified_base 20..21: mod_base = OTHER; note = Thymine
tctgatgccagtgtggtattt

SEQ ID NO: 105 - RNA, 21 nt, synthetic construct
  source 1..21: mol_type = other RNA
  modified_base 1: mod_base = OTHER; note = Thymine
  modified_base 20..21: mod_base = OTHER; note = Thymine
ttaggacacctgattctgttt

SEQ ID NO: 106 - RNA, 21 nt, synthetic construct
  source 1..21: mol_type = other RNA
  modified_base 1: mod_base = OTHER; note = Thymine
  modified_base 20..21: mod_base = OTHER; note = Thymine
tctctaggacacctgattctt

SEQ ID NO: 107 - RNA, 21 nt, synthetic construct
  source 1..21: mol_type = other RNA
  modified_base 1: mod_base = OTHER; note = Thymine
  modified_base 20..21: mod_base = OTHER; note = Thymine
ttctctaggacacctgatttt

SEQ ID NO: 108 - RNA, 21 nt, synthetic construct
  source 1..21: mol_type = other RNA
  modified_base 1: mod_base = OTHER; note = Thymine
  modified_base 20..21: mod_base = OTHER; note = Thymine
tgtctctaggacacctgattt

SEQ ID NO: 109 - RNA, 26 nt, synthetic construct
  source 1..26: mol_type = other RNA
  modified_base 1: mod_base = OTHER; note = Thymine
tgagaatgagcctcgataactcttat

SEQ ID NO: 110 - RNA, 26 nt, synthetic construct
  source 1..26: mol_type = other RNA
  modified_base 1: mod_base = OTHER; note = Thymine
tgacacctgattctgtttctgagtat

SEQ ID NO: 111 - RNA, 26 nt, synthetic construct
  source 1..26: mol_type = other RNA
  modified_base 1: mod_base = OTHER; note = Thymine
tcgtataacaataaggggctgcctat

SEQ ID NO: 112 - RNA, 26 nt, synthetic construct
  source 1..26: mol_type = other RNA
  modified_base 1: mod_base = OTHER; note = Thymine
tgcgtctgagcattgtgtcaggttat

SEQ ID NO: 113 - RNA, 26 nt, synthetic construct
  source 1..26: mol_type = other RNA
  modified_base 1: mod_base = OTHER; note = Thymine
ttgcgtctgagcattgtgtcaggtat

SEQ ID NO: 114 - RNA, 26 nt, synthetic construct
  source 1..26: mol_type = other RNA
  modified_base 1: mod_base = OTHER; note = Thymine
taagggcgaatctcagcatctggtat

SEQ ID NO: 115 - RNA, 18 nt, synthetic construct
  source 1..18: mol_type = other RNA
ttaacaataaggggctgc

SEQ ID NO: 116 - RNA, 18 nt, synthetic construct
  source 1..18: mol_type = other RNA
tgtataacaataaggggc

SEQ ID NO: 117 - RNA, 18 nt, synthetic construct
  source 1..18: mol_type = other RNA
tcgtataacaataagggg

SEQ ID NO: 118 - RNA, 18 nt, synthetic construct
  source 1..18: mol_type = other RNA
tgcgtctgagcattgtgt

SEQ ID NO: 119 - RNA, 18 nt, synthetic construct
  source 1..18: mol_type = other RNA
ttgcgtctgagcattgtg

SEQ ID NO: 120 - RNA, 18 nt, synthetic construct
  source 1..18: mol_type = other RNA
tcaggatctggatttcgg

SEQ ID NO: 121 - RNA, 18 nt, synthetic construct
  source 1..18: mol_type = other RNA
ttgcatctgagcatcgtg

SEQ ID NO: 122 - RNA, 18 nt, synthetic construct
  source 1..18: mol_type = other RNA
tcgactatgctggtgtgg

SEQ ID NO: 123 - RNA, 18 nt, synthetic construct
  source 1..18: mol_type = other RNA
ttttctggggtccgacta

SEQ ID NO: 124 - RNA, 18 nt, synthetic construct
  source 1..18: mol_type = other RNA
tgcgaatctcagcatctg

SEQ ID NO: 125 - RNA, 18 nt, synthetic construct
  source 1..18: mol_type = other RNA
ttgcaaggacacttgatt

SEQ ID NO: 126 - RNA, 18 nt, synthetic construct
  source 1..18: mol_type = other RNA
taatgagcctcgataact

SEQ ID NO: 127 - RNA, 18 nt, synthetic construct
  source 1..18: mol_type = other RNA
tgaatgagcctcgataac

SEQ ID NO: 128 - RNA, 18 nt, synthetic construct
  source 1..18: mol_type = other RNA
tgacattgtgtcaggttg

SEQ ID NO: 129 - RNA, 18 nt, synthetic construct
  source 1..18: mol_type = other RNA
tgagaatgagcctcgata

SEQ ID NO: 130 - RNA, 18 nt, synthetic construct
  source 1..18: mol_type = other RNA
tccatttgggtagtattc

SEQ ID NO: 131 - RNA, 18 nt, synthetic construct
  source 1..18: mol_type = other RNA
tcaccatttgggtagtat

SEQ ID NO: 132 - RNA, 18 nt, synthetic construct
  source 1..18: mol_type = other RNA
tgacacctgattctgttt

SEQ ID NO: 133 - RNA, 18 nt, synthetic construct
  source 1..18: mol_type = other RNA
tggacacctgattctgtt

SEQ ID NO: 134 - RNA, 17 nt, synthetic construct
  source 1..17: mol_type = other RNA
ttaacaataaggggctg

SEQ ID NO: 135 - RNA, 17 nt, synthetic construct
  source 1..17: mol_type = other RNA
tgtataacaataagggg

SEQ ID NO: 136 - RNA, 17 nt, synthetic construct
  source 1..17: mol_type = other RNA
tcgtataacaataaggg

SEQ ID NO: 137 - RNA, 17 nt, synthetic construct
  source 1..17: mol_type = other RNA
tgcgtctgagcattgtg

SEQ ID NO: 138 - RNA, 17 nt, synthetic construct
  source 1..17: mol_type = other RNA
ttgcgtctgagcattgt

SEQ ID NO: 139 - RNA, 17 nt, synthetic construct
  source 1..17: mol_type = other RNA
tcaggatctggatttcg

SEQ ID NO: 140 - RNA, 17 nt, synthetic construct
  source 1..17: mol_type = other RNA
ttgcatctgagcatcgt

SEQ ID NO: 141 - RNA, 17 nt, synthetic construct
  source 1..17: mol_type = other RNA
tcgactatgctggtgtg

SEQ ID NO: 142 - RNA, 17 nt, synthetic construct
  source 1..17: mol_type = other RNA
ttttctggggtccgact

SEQ ID NO: 143 - RNA, 17 nt, synthetic construct
  source 1..17: mol_type = other RNA
tgcgaatctcagcatct

SEQ ID NO: 144 - RNA, 17 nt, synthetic construct
  source 1..17: mol_type = other RNA
ttgcaaggacacttgat

SEQ ID NO: 145 - RNA, 17 nt, synthetic construct
  source 1..17: mol_type = other RNA
taatgagcctcgataac

SEQ ID NO: 146 - RNA, 17 nt, synthetic construct
  source 1..17: mol_type = other RNA
tgaatgagcctcgataa

SEQ ID NO: 147 - RNA, 17 nt, synthetic construct
  source 1..17: mol_type = other RNA
tgacattgtgtcaggtt

SEQ ID NO: 148 - RNA, 17 nt, synthetic construct
  source 1..17: mol_type = other RNA
tgagaatgagcctcgat

SEQ ID NO: 149 - RNA, 17 nt, synthetic construct
  source 1..17: mol_type = other RNA
tccatttgggtagtatt

SEQ ID NO: 150 - RNA, 17 nt, synthetic construct
  source 1..17: mol_type = other RNA
tcaccatttgggtagta

SEQ ID NO: 151 - RNA, 17 nt, synthetic construct
  source 1..17: mol_type = other RNA
tgacacctgattctgtt

SEQ ID NO: 152 - RNA, 17 nt, synthetic construct
  source 1..17: mol_type = other RNA
tggacacctgattctgt

SEQ ID NO: 153 - RNA, 26 nt, synthetic construct
  source 1..26: mol_type = other RNA
tgagaatgagcctcgataactcttat

SEQ ID NO: 154 - RNA, 26 nt, synthetic construct
  source 1..26: mol_type = other RNA
tgacacctgattctgtttctgagtat

SEQ ID NO: 155 - RNA, 26 nt, synthetic construct
  source 1..26: mol_type = other RNA
  modified_base 23: mod_base = OTHER; note = Thymine
tgagaatgagcctcgataactcttat

SEQ ID NO: 156 - RNA, 26 nt, synthetic construct
  source 1..26: mol_type = other RNA
tcgtataacaataaggggctgcctat

SEQ ID NO: 157 - RNA, 21 nt, synthetic construct
  source 1..21: mol_type = other RNA
  modified_base 20..21: mod_base = OTHER; note = Thymine
tgagaatgagcctcgataatt

SEQ ID NO: 158 - RNA, 26 nt, synthetic construct
  source 1..26: mol_type = other RNA
tcgtataacaataaggcgctgcctat

SEQ ID NO: 159 - RNA, 17 nt, synthetic construct
  source 1..17: mol_type = other RNA
  modified_base 17: mod_base = OTHER; note = Thymine
tgagaatgagcctcgat

SEQ ID NO: 160 - RNA, 17 nt, synthetic construct
  source 1..17: mol_type = other RNA
  modified_base 16..17: mod_base = OTHER; note = Thymine
tgacacctgattctgtt

SEQ ID NO: 161 - RNA, 24 nt, synthetic construct
  source 1..24: mol_type = other RNA
tcgtataacaataaggggctgatt

SEQ ID NO: 162 - RNA, 24 nt, synthetic construct
  source 1..24: mol_type = other RNA
tcgtataacaataaggggctgctt

SEQ ID NO: 163 - RNA, 24 nt, synthetic construct
  source 1..24: mol_type = other RNA
tgagaatgagcctcgataactctt

SEQ ID NO: 164 - RNA, 21 nt, synthetic construct
  source 1..21: mol_type = other RNA
tcgtataacaataaggggctt

SEQ ID NO: 165 - RNA, 17 nt, synthetic construct
  source 1..17: mol_type = other RNA
tgtataacaataagggg

SEQ ID NO: 166 - RNA, 17 nt, synthetic construct
  source 1..17: mol_type = other RNA
tcgtataacaataaggg

SEQ ID NO: 167 - RNA, 17 nt, synthetic construct
  source 1..17: mol_type = other RNA
  modified_base 17: mod_base = OTHER; note = Thymine
tgagaatgagcctcgat

SEQ ID NO: 168 - RNA, 17 nt, synthetic construct
  source 1..17: mol_type = other RNA
  modified_base 16..17: mod_base = OTHER; note = Thymine
tgacacctgattctgtt

SEQ ID NO: 169 - RNA, 26 nt, synthetic construct
  source 1..26: mol_type = other RNA
  modified_base 1: mod_base = OTHER; note = Thymine
ttcgtataacaataaggggctgccta

SEQ ID NO: 170 - RNA, 26 nt, synthetic construct
  source 1..26: mol_type = other RNA
tatcgtataacaataaggggctgcct

SEQ ID NO: 171 - RNA, 26 nt, synthetic construct
  source 1..26: mol_type = other RNA
  modified_base 1: mod_base = OTHER; note = Thymine
tccgtataacaataaggggctgccta

SEQ ID NO: 172 - RNA, 26 nt, synthetic construct
  source 1..26: mol_type = other RNA
ctccgtataacaataaggggctgcct

SEQ ID NO: 173 - RNA, 26 nt, synthetic construct
  source 1..26: mol_type = other RNA
  modified_base 1: mod_base = OTHER; note = Thymine
ttgagaatgagcctcgataactctta

SEQ ID NO: 174 - RNA, 26 nt, synthetic construct
  source 1..26: mol_type = other RNA
tatgagaatgagcctcgataactctt

SEQ ID NO: 175 - RNA, 26 nt, synthetic construct
  source 1..26: mol_type = other RNA
  modified_base 1: mod_base = OTHER; note = Thymine
tggagaatgagcctcgataactctta

SEQ ID NO: 176 - RNA, 26 nt, synthetic construct
  source 1..26: mol_type = other RNA
gtggagaatgagcctcgataactctt

SEQ ID NO: 177 - RNA, 21 nt, synthetic construct
  source 1..21: mol_type = other RNA
tgagaatgagcctcgataatt

SEQ ID NO: 178 - RNA, 21 nt, synthetic construct
  source 1..21: mol_type = other RNA
  modified_base 1: mod_base = OTHER; note = Thymine
tcgtataacaataaggggctt

SEQ ID NO: 179 - RNA, 26 nt, synthetic construct
  source 1..26: mol_type = other RNA
tgagaatgagcctcgataattatata

SEQ ID NO: 180 - RNA, 23 nt, synthetic construct
  source 1..23: mol_type = other RNA
tcgtataacaataaggggctgcc

SEQ ID NO: 181 - RNA, 24 nt, synthetic construct
  source 1..24: mol_type = other RNA
  modified_base 1: mod_base = OTHER; note = Thymine
ttcgtataacaataaggggctgcc

SEQ ID NO: 182 - RNA, 22 nt, synthetic construct
  source 1..22: mol_type = other RNA
  modified_base 1: mod_base = OTHER; note = Thymine
ttcgtataacaataaggggctg

SEQ ID NO: 183 - RNA, 26 nt, synthetic construct
  source 1..26: mol_type = other RNA
tgagaatgagcctcgataactatcgc

SEQ ID NO: 184 - RNA, 26 nt, synthetic construct
  source 1..26: mol_type = other RNA
tgagaatgagcctcgataactattca

SEQ ID NO: 185 - RNA, 26 nt, synthetic construct
  source 1..26: mol_type = other RNA
tgagaatgagcctcgataactacgat

SEQ ID NO: 186 - RNA, 21 nt, synthetic construct
  source 1..21: mol_type = other RNA
tcgtataacaataaggggcgt

SEQ ID NO: 187 - RNA, 24 nt, synthetic construct
  source 1..24: mol_type = other RNA
tcgtataacaataaggggctgcct

SEQ ID NO: 188 - RNA, 21 nt, synthetic construct
  source 1..21: mol_type = other RNA
tcgtataacaataaggggctg

SEQ ID NO: 189 - RNA, 24 nt, synthetic construct
  source 1..24: mol_type = other RNA
  modified_base 1: mod_base = OTHER; note = Thymine
tcgtataacaataaggggctgctt

SEQ ID NO: 190 - RNA, 20 nt, synthetic construct
  source 1..20: mol_type = other RNA
  modified_base 20: mod_base = OTHER; note = Thymine
acgcagaagggactgccgat

SEQ ID NO: 191 - RNA, 20 nt, synthetic construct
  source 1..20: mol_type = other RNA
  modified_base 20: mod_base = OTHER; note = Thymine
ggggtgcaggagtgctacat

SEQ ID NO: 192 - RNA, 20 nt, synthetic construct
  source 1..20: mol_type = other RNA
  modified_base 20: mod_base = OTHER; note = Thymine
ctgtggcagccccttattat

SEQ ID NO: 193 - RNA, 20 nt, synthetic construct
  source 1..20: mol_type = other RNA
  modified_base 20: mod_base = OTHER; note = Thymine
ggcagccccttattgttaat

SEQ ID NO: 194 - RNA, 20 nt, synthetic construct
  source 1..20: mol_type = other RNA
  modified_base 20: mod_base = OTHER; note = Thymine
agccccttattgttatacat

SEQ ID NO: 195 - RNA, 20 nt, synthetic construct
  source 1..20: mol_type = other RNA
  modified_base 20: mod_base = OTHER; note = Thymine
gccccttattgttatacgat

SEQ ID NO: 196 - RNA, 20 nt, synthetic construct
  source 1..20: mol_type = other RNA
  modified_base 20: mod_base = OTHER; note = Thymine
tgacacaatgctcagacgat

SEQ ID NO: 197 - RNA, 20 nt, synthetic construct
  source 1..20: mol_type = other RNA
  modified_base 20: mod_base = OTHER; note = Thymine
gacacaatgctcagacgcat

SEQ ID NO: 198 - RNA, 20 nt, synthetic construct
  source 1..20: mol_type = other RNA
  modified_base 20: mod_base = OTHER; note = Thymine
acacaatgctcagacgcaat

SEQ ID NO: 199 - RNA, 20 nt, synthetic construct
  source 1..20: mol_type = other RNA
  modified_base 20: mod_base = OTHER; note = Thymine
acaatgctcagacgcagaat

SEQ ID NO: 200 - RNA, 20 nt, synthetic construct
  source 1..20: mol_type = other RNA
  modified_base 20: mod_base = OTHER; note = Thymine
ctgccgaaatccagatccat

SEQ ID NO: 201 - RNA, 20 nt, synthetic construct
  source 1..20: mol_type = other RNA
  modified_base 20: mod_base = OTHER; note = Thymine
gccgaaatccagatcctgat

SEQ ID NO: 202 - RNA, 20 nt, synthetic construct
  source 1..20: mol_type = other RNA
  modified_base 20: mod_base = OTHER; note = Thymine
tgacacgatgctcagatgat

SEQ ID NO: 203 - RNA, 20 nt, synthetic construct
  source 1..20: mol_type = other RNA
  modified_base 20: mod_base = OTHER; note = Thymine
gacacgatgctcagatgcat

SEQ ID NO: 204 - RNA, 20 nt, synthetic construct
  source 1..20: mol_type = other RNA
  modified_base 20: mod_base = OTHER; note = Thymine
acacgatgctcagatgcaat

SEQ ID NO: 205 - RNA, 20 nt, synthetic construct
  source 1..20: mol_type = other RNA
  modified_base 20: mod_base = OTHER; note = Thymine
acgatgctcagatgcagaat

SEQ ID NO: 206 - RNA, 20 nt, synthetic construct
  source 1..20: mol_type = other RNA
  modified_base 20: mod_base = OTHER; note = Thymine
tccaagcctagaggctttat

SEQ ID NO: 207 - RNA, 20 nt, synthetic construct
  source 1..20: mol_type = other RNA
  modified_base 20: mod_base = OTHER; note = Thymine
aggaaacccccggggtacat

SEQ ID NO: 208 - RNA, 20 nt, synthetic construct
  source 1..20: mol_type = other RNA
  modified_base 20: mod_base = OTHER; note = Thymine
ggaaacccccggggtacaat

SEQ ID NO: 209 - RNA, 20 nt, synthetic construct
  source 1..20: mol_type = other RNA
  modified_base 20: mod_base = OTHER; note = Thymine
gaaacccccggggtacagat

SEQ ID NO: 210 - RNA, 20 nt, synthetic construct
  source 1..20: mol_type = other RNA
  modified_base 20: mod_base = OTHER; note = Thymine
tgctactaccattatggaat

SEQ ID NO: 211 - RNA, 20 nt, synthetic construct
  source 1..20: mol_type = other RNA
  modified_base 20: mod_base = OTHER; note = Thymine
gctactaccattatggacat

SEQ ID NO: 212 - RNA, 20 nt, synthetic construct
  source 1..20: mol_type = other RNA
  modified_base 20: mod_base = OTHER; note = Thymine
ctaccattatggacagagat

SEQ ID NO: 213 - RNA, 20 nt, synthetic construct
  source 1..20: mol_type = other RNA
  modified_base 20: mod_base = OTHER; note = Thymine
accacaccagcatagtcgat

SEQ ID NO: 214 - RNA, 20 nt, synthetic construct
  source 1..20: mol_type = other RNA
  modified_base 20: mod_base = OTHER; note = Thymine
ccacaccagcatagtcggat

SEQ ID NO: 215 - RNA, 20 nt, synthetic construct
  source 1..20: mol_type = other RNA
  modified_base 20: mod_base = OTHER; note = Thymine
cacaccagcatagtcggaat

SEQ ID NO: 216 - RNA, 20 nt, synthetic construct
  source 1..20: mol_type = other RNA
  modified_base 20: mod_base = OTHER; note = Thymine
caccagcatagtcggaccat

SEQ ID NO: 217 - RNA, 20 nt, synthetic construct
  source 1..20: mol_type = other RNA
  modified_base 20: mod_base = OTHER; note = Thymine
atagtcggaccccagaaaat

SEQ ID NO: 218 - RNA, 20 nt, synthetic construct
  source 1..20: mol_type = other RNA
  modified_base 20: mod_base = OTHER; note = Thymine
tagtcggaccccagaaaaat

SEQ ID NO: 219 - RNA, 20 nt, synthetic construct
  source 1..20: mol_type = other RNA
  modified_base 20: mod_base = OTHER; note = Thymine
ccagatgctgagattcgcat

SEQ ID NO: 220 - RNA, 20 nt, synthetic construct
  source 1..20: mol_type = other RNA
  modified_base 20: mod_base = OTHER; note = Thymine
gctgagattcgcccttggat

SEQ ID NO: 221 - RNA, 20 nt, synthetic construct
  source 1..20: mol_type = other RNA
  modified_base 20: mod_base = OTHER; note = Thymine
ctgagattcgcccttggtat

SEQ ID NO: 222 - RNA, 20 nt, synthetic construct
  source 1..20: mol_type = other RNA
  modified_base 20: mod_base = OTHER; note = Thymine
tgagattcgcccttggtgat

SEQ ID NO: 223 - RNA, 20 nt, synthetic construct
  source 1..20: mol_type = other RNA
  modified_base 20: mod_base = OTHER; note = Thymine
gagattcgcccttggtgtat

SEQ ID NO: 224 - RNA, 20 nt, synthetic construct
  source 1..20: mol_type = other RNA
  modified_base 20: mod_base = OTHER; note = Thymine
atggatcccagtgtcaggat

SEQ ID NO: 225 - RNA, 20 nt, synthetic construct
  source 1..20: mol_type = other RNA
  modified_base 20: mod_base = OTHER; note = Thymine
gaatcaagtgtccttgcaat

SEQ ID NO: 226 - RNA, 20 nt, synthetic construct
  source 1..20: mol_type = other RNA
  modified_base 20: mod_base = OTHER; note = Thymine
aatcaagtgtccttgcaaat

SEQ ID NO: 227 - RNA, 20 nt, synthetic construct
  source 1..20: mol_type = other RNA
  modified_base 20: mod_base = OTHER; note = Thymine
gaagcaccaacggagcaaat

SEQ ID NO: 228 - RNA, 20 nt, synthetic construct
  source 1..20: mol_type = other RNA
  modified_base 20: mod_base = OTHER; note = Thymine
gagttatcgaggctcattat

SEQ ID NO: 229 - RNA, 20 nt, synthetic construct
  source 1..20: mol_type = other RNA
  modified_base 20: mod_base = OTHER; note = Thymine
agttatcgaggctcattcat

SEQ ID NO: 230 - RNA, 20 nt, synthetic construct
  source 1..20: mol_type = other RNA
  modified_base 20: mod_base = OTHER; note = Thymine
gacaacagaatattatccat

SEQ ID NO: 231 - RNA, 20 nt, synthetic construct
  source 1..20: mol_type = other RNA
  modified_base 20: mod_base = OTHER; note = Thymine
cttggtgttataccatggat

SEQ ID NO: 232 - RNA, 20 nt, synthetic construct
  source 1..20: mol_type = other RNA
  modified_base 20: mod_base = OTHER; note = Thymine
ggtgttataccatggatcat

SEQ ID NO: 233 - RNA, 20 nt, synthetic construct
  source 1..20: mol_type = other RNA
  modified_base 20: mod_base = OTHER; note = Thymine
tataccatggatcccaatat

SEQ ID NO: 234 - RNA, 20 nt, synthetic construct
  source 1..20: mol_type = other RNA
  modified_base 20: mod_base = OTHER; note = Thymine
ataccatggatcccaatgat

SEQ ID NO: 235 - RNA, 20 nt, synthetic construct
  source 1..20: mol_type = other RNA
  modified_base 20: mod_base = OTHER; note = Thymine
taccatggatcccaatgtat

SEQ ID NO: 236 - RNA, 20 nt, synthetic construct
  source 1..20: mol_type = other RNA
  modified_base 20: mod_base = OTHER; note = Thymine
accatggatcccaatgtcat

SEQ ID NO: 237 - RNA, 20 nt, synthetic construct
  source 1..20: mol_type = other RNA
  modified_base 20: mod_base = OTHER; note = Thymine
gcaacctgacacaatgtcat

SEQ ID NO: 238 - RNA, 20 nt, synthetic construct
  source 1..20: mol_type = other RNA
  modified_base 20: mod_base = OTHER; note = Thymine
ctgacacaatgtccagtgat

SEQ ID NO: 239 - RNA, 20 nt, synthetic construct
  source 1..20: mol_type = other RNA
  modified_base 20: mod_base = OTHER; note = Thymine
ccagtgacagaatcaagtat

SEQ ID NO: 240 - RNA, 20 nt, synthetic construct
  source 1..20: mol_type = other RNA
  modified_base 20: mod_base = OTHER; note = Thymine
ttatcgaggctcattctcat

SEQ ID NO: 241 - RNA, 20 nt, synthetic construct
  source 1..20: mol_type = other RNA
  modified_base 20: mod_base = OTHER; note = Thymine
agaatactacccaaatggat

SEQ ID NO: 242 - RNA, 20 nt, synthetic construct
  source 1..20: mol_type = other RNA
  modified_base 20: mod_base = OTHER; note = Thymine
aatactacccaaatggtgat

SEQ ID NO: 243 - RNA, 20 nt, synthetic construct
  source 1..20: mol_type = other RNA
  modified_base 20: mod_base = OTHER; note = Thymine
atactacccaaatggtggat

SEQ ID NO: 244 - RNA, 20 nt, synthetic construct
  source 1..20: mol_type = other RNA
  modified_base 20: mod_base = OTHER; note = Thymine
attcgcccttggtgttatat

SEQ ID NO: 245 - RNA, 20 nt, synthetic construct
  source 1..20: mol_type = other RNA
  modified_base 20: mod_base = OTHER; note = Thymine
tataccatggatcccagtat

SEQ ID NO: 246 - RNA, 20 nt, synthetic construct
  source 1..20: mol_type = other RNA
  modified_base 20: mod_base = OTHER; note = Thymine
ataccatggatcccagtgat

SEQ ID NO: 247 - RNA, 20 nt, synthetic construct
  source 1..20: mol_type = other RNA
  modified_base 20: mod_base = OTHER; note = Thymine
cacaactcccacggtggtat

SEQ ID NO: 248 - RNA, 20 nt, synthetic construct
  source 1..20: mol_type = other RNA
  modified_base 20: mod_base = OTHER; note = Thymine
aagaacatgtcagtcttgat

SEQ ID NO: 249 - RNA, 20 nt, synthetic construct
  source 1..20: mol_type = other RNA
  modified_base 20: mod_base = OTHER; note = Thymine
agtgtcctcacaactcccat

SEQ ID NO: 250 - RNA, 20 nt, synthetic construct
  source 1..20: mol_type = other RNA
  modified_base 20: mod_base = OTHER; note = Thymine
aacaagcaccacctgagaat

SEQ ID NO: 251 - RNA, 20 nt, synthetic construct
  source 1..20: mol_type = other RNA
  modified_base 20: mod_base = OTHER; note = Thymine
cctgagaaaagccctgtgat

SEQ ID NO: 252 - RNA, 20 nt, synthetic construct
  source 1..20: mol_type = other RNA
  modified_base 20: mod_base = OTHER; note = Thymine
tgataccacactggcatcat

SEQ ID NO: 253 - RNA, 20 nt, synthetic construct
  source 1..20: mol_type = other RNA
  modified_base 20: mod_base = OTHER; note = Thymine
gataccacactggcatcaat

SEQ ID NO: 254 - RNA, 20 nt, synthetic construct
  source 1..20: mol_type = other RNA
  modified_base 20: mod_base = OTHER; note = Thymine
gaaacagaatcaggtgtcat

SEQ ID NO: 255 - RNA, 20 nt, synthetic construct
  source 1..20: mol_type = other RNA
  modified_base 20: mod_base = OTHER; note = Thymine
aaacagaatcaggtgtccat

SEQ ID NO: 256 - RNA, 20 nt, synthetic construct
  source 1..20: mol_type = other RNA
  modified_base 20: mod_base = OTHER; note = Thymine
cagaatcaggtgtcctagat

SEQ ID NO: 257 - RNA, 20 nt, synthetic construct
  source 1..20: mol_type = other RNA
  modified_base 20: mod_base = OTHER; note = Thymine
cctgtggcagccccttatat

SEQ ID NO: 258 - RNA, 20 nt, synthetic construct
  source 1..20: mol_type = other RNA
  modified_base 20: mod_base = OTHER; note = Thymine
tggcagccccttattgttat

SEQ ID NO: 259 - RNA, 20 nt, synthetic construct
  source 1..20: mol_type = other RNA
  modified_base 20: mod_base = OTHER; note = Thymine
acaccagcatagtcggacat

SEQ ID NO: 260 - RNA, 20 nt, synthetic construct
  source 1..20: mol_type = other RNA
  modified_base 20: mod_base = OTHER; note = Thymine
ggaatccagatgctgagaat

SEQ ID NO: 261 - RNA, 20 nt, synthetic construct
  source 1..20: mol_type = other RNA
  modified_base 20: mod_base = OTHER; note = Thymine
tccagatgctgagattcgat

SEQ ID NO: 262 - RNA, 20 nt, synthetic construct
  source 1..20: mol_type = other RNA
  modified_base 20: mod_base = OTHER; note = Thymine
atgctgagattcgcccttat

SEQ ID NO: 263 - RNA, 20 nt, synthetic construct
  source 1..20: mol_type = other RNA
  modified_base 20: mod_base = OTHER; note = Thymine
ccatggatcccagtgtcaat

SEQ ID NO: 264 - RNA, 20 nt, synthetic construct
  source 1..20: mol_type = other RNA
  modified_base 20: mod_base = OTHER; note = Thymine
ctgaagaagcaccaacggat

SEQ ID NO: 265 - RNA, 20 nt, synthetic construct
  source 1..20: mol_type = other RNA
  modified_base 20: mod_base = OTHER; note = Thymine
tccagtgacagaatcaagat

SEQ ID NO: 266 - RNA, 20 nt, synthetic construct
  source 1..20: mol_type = other RNA
  modified_base 20: mod_base = OTHER; note = Thymine
ctcacaactcccacggtgat

SEQ ID NO: 267 - RNA, 20 nt, synthetic construct
  source 1..20: mol_type = other RNA
  modified_base 20: mod_base = OTHER; note = Thymine
agaatcaggtgtcctagaat

SEQ ID NO: 268 - RNA, 20 nt, synthetic construct
  source 1..20: mol_type = other RNA
  modified_base 20: mod_base = OTHER; note = Thymine
tcaggtgtcctagagactat

SEQ ID NO: 269 - RNA, 23 nt, synthetic construct
  source 1..23: mol_type = other RNA
  modified_base 23: mod_base = OTHER; note = Thymine
tatagccccttattgttatacat

SEQ ID NO: 270 - RNA, 23 nt, synthetic construct
  source 1..23: mol_type = other RNA
  modified_base 23: mod_base = OTHER; note = Thymine
tatgccccttattgttatacgat

SEQ ID NO: 271 - RNA, 23 nt, synthetic construct
  source 1..23: mol_type = other RNA
  modified_base 23: mod_base = OTHER; note = Thymine
tatgacacaatgctcagacgcat

SEQ ID NO: 272 - RNA, 23 nt, synthetic construct
  source 1..23: mol_type = other RNA
  modified_base 23: mod_base = OTHER; note = Thymine
tatacacaatgctcagacgcaat

SEQ ID NO: 273 - RNA, 23 nt, synthetic construct
  source 1..23: mol_type = other RNA
  modified_base 23: mod_base = OTHER; note = Thymine
tatttatcgaggctcattctcat

SEQ ID NO: 274 - RNA, 23 nt, synthetic construct
  source 1..23: mol_type = other RNA
  modified_base 23: mod_base = OTHER; note = Thymine
tatgaaacagaatcaggtgtcat

SEQ ID NO: 275 - RNA, 23 nt, synthetic construct
  source 1..23: mol_type = other RNA
  modified_base 23: mod_base = OTHER; note = Thymine
tatacaccagcatagtcggacat

SEQ ID NO: 276 - RNA, 23 nt, synthetic construct
  source 1..23: mol_type = other RNA
  modified_base 23: mod_base = OTHER; note = Thymine
tattccagatgctgagattcgat

SEQ ID NO: 277 - RNA, 23 nt, synthetic construct
  source 1..23: mol_type = other RNA
  modified_base 23: mod_base = OTHER; note = Thymine
tatatgctgagattcgcccttat

SEQ ID NO: 278 - RNA, 23 nt, synthetic construct
  source 1..23: mol_type = other RNA
  modified_base 23: mod_base = OTHER; note = Thymine
tatccatggatcccagtgtcaat

SEQ ID NO: 279 - RNA, 20 nt, synthetic construct
  source 1..20: mol_type = other RNA
  modified_base 20: mod_base = OTHER; note = Thymine
tgtggcagccccttattgat

SEQ ID NO: 280 - RNA, 20 nt, synthetic construct
  source 1..20: mol_type = other RNA
  modified_base 20: mod_base = OTHER; note = Thymine
cacaatgctcagacgcagat

SEQ ID NO: 281 - RNA, 20 nt, synthetic construct
  source 1..20: mol_type = other RNA
  modified_base 20: mod_base = OTHER; note = Thymine
ccgaaatccagatcctgtat

SEQ ID NO: 282 - RNA, 20 nt, synthetic construct
  source 1..20: mol_type = other RNA
  modified_base 20: mod_base = OTHER; note = Thymine
gactgaggaaacccccggat

SEQ ID NO: 283 - RNA, 20 nt, synthetic construct
  source 1..20: mol_type = other RNA
  modified_base 20: mod_base = OTHER; note = Thymine
ctactaccattatggacaat

SEQ ID NO: 284 - RNA, 20 nt, synthetic construct
  source 1..20: mol_type = other RNA
  modified_base 20: mod_base = OTHER; note = Thymine
actaccattatggacagaat

SEQ ID NO: 285 - RNA, 20 nt, synthetic construct
  source 1..20: mol_type = other RNA
  modified_base 20: mod_base = OTHER; note = Thymine
taccattatggacagagtat

SEQ ID NO: 286 - RNA, 20 nt, synthetic construct
  source 1..20: mol_type = other RNA
  modified_base 20: mod_base = OTHER; note = Thymine
accattatggacagagttat

SEQ ID NO: 287 - RNA, 20 nt, synthetic construct
  source 1..20: mol_type = other RNA
  modified_base 20: mod_base = OTHER; note = Thymine
agatgctgagattcgcccat

SEQ ID NO: 288 - RNA, 20 nt, synthetic construct
  source 1..20: mol_type = other RNA
  modified_base 20: mod_base = OTHER; note = Thymine
gatgctgagattcgccctat

SEQ ID NO: 289 - RNA, 20 nt, synthetic construct
  source 1..20: mol_type = other RNA
  modified_base 20: mod_base = OTHER; note = Thymine
agattcgcccttggtgttat

SEQ ID NO: 290 - RNA, 20 nt, synthetic construct
  source 1..20: mol_type = other RNA
  modified_base 20: mod_base = OTHER; note = Thymine
gacagaatcaagtgtcctat

SEQ ID NO: 291 - RNA, 20 nt, synthetic construct
  source 1..20: mol_type = other RNA
  modified_base 20: mod_base = OTHER; note = Thymine
acatgtcagtcttggtccat

SEQ ID NO: 292 - RNA, 20 nt, synthetic construct
  source 1..20: mol_type = other RNA
  modified_base 20: mod_base = OTHER; note = Thymine
ccaaatggtggcctgaccat

SEQ ID NO: 293 - RNA, 20 nt, synthetic construct
  source 1..20: mol_type = other RNA
  modified_base 20: mod_base = OTHER; note = Thymine
tggtgttataccatggatat

SEQ ID NO: 294 - RNA, 20 nt, synthetic construct
  source 1..20: mol_type = other RNA
  modified_base 20: mod_base = OTHER; note = Thymine
tgttataccatggatcccat

SEQ ID NO: 295 - RNA, 20 nt, synthetic construct
  source 1..20: mol_type = other RNA
  modified_base 20: mod_base = OTHER; note = Thymine
aacctgacacaatgtccaat

SEQ ID NO: 296 - RNA, 20 nt, synthetic construct
  source 1..20: mol_type = other RNA
  modified_base 20: mod_base = OTHER; note = Thymine
aatgtccagtgacagaatat

SEQ ID NO: 297 - RNA, 20 nt, synthetic construct
  source 1..20: mol_type = other RNA
  modified_base 20: mod_base = OTHER; note = Thymine
tgtttctgaacaagcaccat

SEQ ID NO: 298 - RNA, 20 nt, synthetic construct
  source 1..20: mol_type = other RNA
  modified_base 20: mod_base = OTHER; note = Thymine
tatcgaggctcattctccat

SEQ ID NO: 299 - RNA, 20 nt, synthetic construct
  source 1..20: mol_type = other RNA
  modified_base 20: mod_base = OTHER; note = Thymine
tcgaggctcattctccacat

SEQ ID NO: 300 - RNA, 20 nt, synthetic construct
  source 1..20: mol_type = other RNA
  modified_base 20: mod_base = OTHER; note = Thymine
tcctcacaactcccacggat

SEQ ID NO: 301 - RNA, 20 nt, synthetic construct
  source 1..20: mol_type = other RNA
  modified_base 20: mod_base = OTHER; note = Thymine
caactcccacggtggtccat

SEQ ID NO: 302 - RNA, 20 nt, synthetic construct
  source 1..20: mol_type = other RNA
  modified_base 20: mod_base = OTHER; note = Thymine
gctccttctgaacaagcaat

SEQ ID NO: 303 - RNA, 20 nt, synthetic construct
  source 1..20: mol_type = other RNA
  modified_base 20: mod_base = OTHER; note = Thymine
ataccacactggcatcagat

SEQ ID NO: 304 - RNA, 20 nt, synthetic construct
  source 1..20: mol_type = other RNA
  modified_base 20: mod_base = OTHER; note = Thymine
acagaatcaggtgtcctaat

SEQ ID NO: 305 - RNA, 20 nt, synthetic construct
  source 1..20: mol_type = other RNA
  modified_base 20: mod_base = OTHER; note = Thymine
gaatcaggtgtcctagagat

SEQ ID NO: 306 - RNA, 20 nt, synthetic construct
  source 1..20: mol_type = other RNA
  modified_base 20: mod_base = OTHER; note = Thymine
aatcaggtgtcctagagaat

SEQ ID NO: 307 - RNA, 20 nt, synthetic construct
  source 1..20: mol_type = other RNA
  modified_base 20: mod_base = OTHER; note = Thymine
atcaggtgtcctagagacat

SEQ ID NO: 308 - RNA, 26 nt, synthetic construct
  source 1..26: mol_type = other RNA
tatatagttatcgaggctcattctca

SEQ ID NO: 309 - RNA, 26 nt, synthetic construct
  source 1..26: mol_type = other RNA
tatatcagaaacagaatcaggtgtca

SEQ ID NO: 310 - RNA, 26 nt, synthetic construct
  source 1..26: mol_type = other RNA
tatatcagccccttattgttatacga

SEQ ID NO: 311 - RNA, 26 nt, synthetic construct
  source 1..26: mol_type = other RNA
tatatctgacacaatgctcagacgca

SEQ ID NO: 312 - RNA, 26 nt, synthetic construct
  source 1..26: mol_type = other RNA
tatattgacacaatgctcagacgcaa

SEQ ID NO: 313 - RNA, 26 nt, synthetic construct
  source 1..26: mol_type = other RNA
tatatagatgctgagattcgccctta

SEQ ID NO: 314 - RNA, 18 nt, synthetic construct
  source 1..18: mol_type = other RNA
gcagccccttattgttaa

SEQ ID NO: 315 - RNA, 18 nt, synthetic construct
  source 1..18: mol_type = other RNA
gccccttattgttataca

SEQ ID NO: 316 - RNA, 18 nt, synthetic construct
  source 1..18: mol_type = other RNA
ccccttattgttatacga

SEQ ID NO: 317 - RNA, 18 nt, synthetic construct
  source 1..18: mol_type = other RNA
acacaatgctcagacgca

SEQ ID NO: 318 - RNA, 18 nt, synthetic construct
  source 1..18: mol_type = other RNA
cacaatgctcagacgcaa

SEQ ID NO: 319 - RNA, 18 nt, synthetic construct
  source 1..18: mol_type = other RNA
ccgaaatccagatcctga

SEQ ID NO: 320 - RNA, 18 nt, synthetic construct
  source 1..18: mol_type = other RNA
cacgatgctcagatgcaa

SEQ ID NO: 321 - RNA, 18 nt, synthetic construct
  source 1..18: mol_type = other RNA
ccacaccagcatagtcga

SEQ ID NO: 322 - RNA, 18 nt, synthetic construct
  source 1..18: mol_type = other RNA
tagtcggaccccagaaaa

SEQ ID NO: 323 - RNA, 18 nt, synthetic construct
  source 1..18: mol_type = other RNA
cagatgctgagattcgca

SEQ ID NO: 324 - RNA, 18 nt, synthetic construct
  source 1..18: mol_type = other RNA
aatcaagtgtccttgcaa

SEQ ID NO: 325 - RNA, 18 nt, synthetic construct
  source 1..18: mol_type = other RNA
agttatcgaggctcatta

SEQ ID NO: 326 - RNA, 18 nt, synthetic construct
  source 1..18: mol_type = other RNA
gttatcgaggctcattca

SEQ ID NO: 327 - RNA, 18 nt, synthetic construct
  source 1..18: mol_type = other RNA
caacctgacacaatgtca

SEQ ID NO: 328 - RNA, 18 nt, synthetic construct
  source 1..18: mol_type = other RNA
tatcgaggctcattctca

SEQ ID NO: 329 - RNA, 18 nt, synthetic construct
  source 1..18: mol_type = other RNA
gaatactacccaaatgga

SEQ ID NO: 330 - RNA, 18 nt, synthetic construct
  source 1..18: mol_type = other RNA
atactacccaaatggtga

SEQ ID NO: 331 - RNA, 18 nt, synthetic construct
  source 1..18: mol_type = other RNA
aaacagaatcaggtgtca

SEQ ID NO: 332 - RNA, 18 nt, synthetic construct
  source 1..18: mol_type = other RNA
aacagaatcaggtgtcca

SEQ ID NO: 333 - RNA, 17 nt, synthetic construct
  source 1..17: mol_type = other RNA
cagccccttattgttaa

SEQ ID NO: 334 - RNA, 17 nt, synthetic construct
  source 1..17: mol_type = other RNA
ccccttattgttataca

SEQ ID NO: 335 - RNA, 17 nt, synthetic construct
  source 1..17: mol_type = other RNA
cccttattgttatacga

SEQ ID NO: 336 - RNA, 17 nt, synthetic construct
  source 1..17: mol_type = other RNA
cacaatgctcagacgca

SEQ ID NO: 337 - RNA, 17 nt, synthetic construct
  source 1..17: mol_type = other RNA
acaatgctcagacgcaa

SEQ ID NO: 338 - RNA, 17 nt, synthetic construct
  source 1..17: mol_type = other RNA
cgaaatccagatcctga

SEQ ID NO: 339 - RNA, 17 nt, synthetic construct
  source 1..17: mol_type = other RNA
acgatgctcagatgcaa

SEQ ID NO: 340 - RNA, 17 nt, synthetic construct
  source 1..17: mol_type = other RNA
cacaccagcatagtcga

SEQ ID NO: 341 - RNA, 17 nt, synthetic construct
  source 1..17: mol_type = other RNA
agtcggaccccagaaaa

SEQ ID NO: 342 - RNA, 17 nt, synthetic construct
  source 1..17: mol_type = other RNA
agatgctgagattcgca

SEQ ID NO: 343 - RNA, 17 nt, synthetic construct
  source 1..17: mol_type = other RNA
atcaagtgtccttgcaa

SEQ ID NO: 344 - RNA, 17 nt, synthetic construct
  source 1..17: mol_type = other RNA
gttatcgaggctcatta

SEQ ID NO: 345 - RNA, 17 nt, synthetic construct
  source 1..17: mol_type = other RNA
ttatcgaggctcattca

SEQ ID NO: 346 - RNA, 17 nt, synthetic construct
  source 1..17: mol_type = other RNA
aacctgacacaatgtca

SEQ ID NO: 347 - RNA, 17 nt, synthetic construct
  source 1..17: mol_type = other RNA
atcgaggctcattctca

SEQ ID NO: 348 - RNA, 17 nt, synthetic construct
  source 1..17: mol_type = other RNA
aatactacccaaatgga

SEQ ID NO: 349 - RNA, 17 nt, synthetic construct
  source 1..17: mol_type = other RNA
tactacccaaatggtga

SEQ ID NO: 350 - RNA, 17 nt, synthetic construct
  source 1..17: mol_type = other RNA
aacagaatcaggtgtca

SEQ ID NO: 351 - RNA, 17 nt, synthetic construct
  source 1..17: mol_type = other RNA
acagaatcaggtgtcca

SEQ ID NO: 352 - RNA, 26 nt, synthetic construct
  source 1..26: mol_type = other RNA
tatatcagcgccttattgttatacga

SEQ ID NO: 353 - RNA, 17 nt, synthetic construct
  source 1..17: mol_type = other RNA
  modified_base 2: mod_base = OTHER; note = Thymine
atcgaggctcattctca

SEQ ID NO: 354 - RNA, 24 nt, synthetic construct
  source 1..24: mol_type = other RNA
tcagccccttattgttatacgatt

SEQ ID NO: 355 - RNA, 22 nt, synthetic construct
  source 1..22: mol_type = other RNA
tcagccccttattgttatacga

SEQ ID NO: 356 - RNA, 24 nt, synthetic construct
  source 1..24: mol_type = other RNA
tagttatcgaggctcattctcatt

SEQ ID NO: 357 - RNA, 21 nt, synthetic construct
  source 1..21: mol_type = other RNA
gccccttattgttatacgatt

SEQ ID NO: 358 - RNA, 26 nt, synthetic construct
  source 1..26: mol_type = other RNA
  modified_base 26: mod_base = OTHER; note = Thymine
atatcagccccttattgttatacgat

SEQ ID NO: 359 - RNA, 26 nt, synthetic construct
  source 1..26: mol_type = other RNA
  modified_base 26: mod_base = OTHER; note = Thymine
tatcagccccttattgttatacgatt

SEQ ID NO: 360 - RNA, 26 nt, synthetic construct
  source 1..26: mol_type = other RNA
  modified_base 26: mod_base = OTHER; note = Thymine
atatagttatcgaggctcattctcat

SEQ ID NO: 361 - RNA, 26 nt, synthetic construct
  source 1..26: mol_type = other RNA
  modified_base 26: mod_base = OTHER; note = Thymine
tatagttatcgaggctcattctcatt

SEQ ID NO: 362 - RNA, 21 nt, synthetic construct
  source 1..21: mol_type = other RNA
ttatcgaggctcattctcatt

SEQ ID NO: 363 - RNA, 26 nt, synthetic construct
  source 1..26: mol_type = other RNA
tatataattatcgaggctcattctca

SEQ ID NO: 364 - RNA, 25 nt, synthetic construct
  source 1..25: mol_type = other RNA
  modified_base 24..25: mod_base = OTHER; note = Thymine
ggcagccccttattgttatacgatt

SEQ ID NO: 365 - RNA, 26 nt, synthetic construct
  source 1..26: mol_type = other RNA
  modified_base 26: mod_base = OTHER; note = Thymine
ggcagccccttattgttatacgattt

SEQ ID NO: 366 - RNA, 25 nt, synthetic construct
  source 1..25: mol_type = other RNA
  modified_base 22..25: mod_base = OTHER; note = Thymine
cagccccttattgttatacgatttt

SEQ ID NO: 367 - RNA, 26 nt, synthetic construct
  source 1..26: mol_type = other RNA
gcgatagttatcgaggctcattctca

SEQ ID NO: 368 - RNA, 26 nt, synthetic construct
  source 1..26: mol_type = other RNA
tgaatagttatcgaggctcattctca

SEQ ID NO: 369 - RNA, 26 nt, synthetic construct
  source 1..26: mol_type = other RNA
atcgtagttatcgaggctcattctca

SEQ ID NO: 370 - RNA, 26 nt, synthetic construct
  source 1..26: mol_type = other RNA
tataaagttatcgaggctcattctca

SEQ ID NO: 371 - RNA, 20 nt, synthetic construct
  source 1..20: mol_type = other RNA
agccccttattgttatacga

SEQ ID NO: 372 - RNA, 21 nt, synthetic construct
  source 1..21: mol_type = other RNA
aagccccttattgttatacga

SEQ ID NO: 373 - RNA, 22 nt, synthetic construct
  source 1..22: mol_type = other RNA
gcagccccttattgttatacga

SEQ ID NO: 374 - RNA, 26 nt, synthetic construct
  source 1..26: mol_type = other RNA
tatatagttatcgaggctcattctca

SEQ ID NO: 375 - RNA, 21 nt, synthetic construct
  source 1..21: mol_type = other RNA
acgccccttattgttatacga

SEQ ID NO: 376 - RNA, 21 nt, synthetic construct
  source 1..21: mol_type = other RNA
gccccttattgttatacgatt

SEQ ID NO: 377 - RNA, 22 nt, synthetic construct
  source 1..22: mol_type = other RNA
agccccttattgttatacgatt

SEQ ID NO: 378 - RNA, 23 nt, synthetic construct
  source 1..23: mol_type = other RNA
aagccccttattgttatacgatt

SEQ ID NO: 379 - RNA, 24 nt, synthetic construct
  source 1..24: mol_type = other RNA
tatcagccccttattgttatacga

SEQ ID NO: 380 - RNA, 24 nt, synthetic construct
  source 1..24: mol_type = other RNA
tagcagccccttattgttatacga

SEQ ID NO: 381 - RNA, 22 nt, synthetic construct
  source 1..22: mol_type = other RNA
gcagccccttattgttatacga

SEQ ID NO: 382 - RNA, 26 nt, synthetic construct
  source 1..26: mol_type = other RNA
ataagagttatcgaggctcattctca

SEQ ID NO: 383 - RNA, 26 nt, synthetic construct
  source 1..26: mol_type = other RNA
ataggcagccccttattgttatacga

SEQ ID NO: 384 - RNA, 21 nt, synthetic construct
  source 1..21: mol_type = other RNA
cagccccttattgttatacga

SEQ ID NO: 385 - RNA, 26 nt, synthetic construct
  source 1..26: mol_type = other RNA
  modified_base 13: mod_base = OTHER; note = Thymine
tatatcagccccttattgttatacga

SEQ ID NO: 386 - RNA, 21 nt, synthetic construct
  source 1..21: mol_type = other RNA
  modified_base 1: mod_base = OTHER; note = 2'-deoxy nucleotide
  modified_base 20..21: mod_base = OTHER; note = 2'-deoxy nucleotide
  modified_base 3: mod_base = OTHER; note = 2'-OMe modified nucleotide
  modified_base 5: mod_base = OTHER; note = 2'-OMe modified nucleotide
  modified_base 7: mod_base = OTHER; note = 2'-OMe modified nucleotide
  modified_base 9: mod_base = OTHER; note = 2'-OMe modified nucleotide
  modified_base 11: mod_base = OTHER; note = 2'-OMe modified nucleotide
  modified_base 13: mod_base = OTHER; note = 2'-OMe modified nucleotide
  modified_base 15: mod_base = OTHER; note = 2'-OMe modified nucleotide
  modified_base 17: mod_base = OTHER; note = 2'-OMe modified nucleotide
  modified_base 19: mod_base = OTHER; note = 2'-OMe modified nucleotide
  modified_base 2: mod_base = OTHER; note = 2-deoxy-2-fluoro ribonucleotide
  modified_base 4: mod_base = OTHER; note = 2-deoxy-2-fluoro ribonucleotide
  modified_base 6: mod_base = OTHER; note = 2-deoxy-2-fluoro ribonucleotide
  modified_base 8: mod_base = OTHER; note = 2-deoxy-2-fluoro ribonucleotide
  modified_base 10: mod_base = OTHER; note = 2-deoxy-2-fluoro ribonucleotide
  modified_base 12: mod_base = OTHER; note = 2-deoxy-2-fluoro ribonucleotide
  modified_base 14: mod_base = OTHER; note = 2-deoxy-2-fluoro ribonucleotide
  modified_base 16: mod_base = OTHER; note = 2-deoxy-2-fluoro ribonucleotide
  modified_base 18: mod_base = OTHER; note = 2-deoxy-2-fluoro ribonucleotide
  modified_base 20..21: mod_base = OTHER; note = phosphorothioate internucleotide linkage
  modified_base 1: mod_base = OTHER; note = Thymine
  modified_base 20..21: mod_base = OTHER; note = Thymine
tcggcagtcccttctgcgttt

SEQ ID NO: 387 - RNA, 21 nt, synthetic construct
  source 1..21: mol_type = other RNA
  modified_base 1: mod_base = OTHER; note = 2'-deoxy nucleotide
  modified_base 20..21: mod_base = OTHER; note = 2'-deoxy nucleotide
  modified_base 3: mod_base = OTHER; note = 2'-OMe modified nucleotide
  modified_base 5: mod_base = OTHER; note = 2'-OMe modified nucleotide
  modified_base 7: mod_base = OTHER; note = 2'-OMe modified nucleotide
  modified_base 9: mod_base = OTHER; note = 2'-OMe modified nucleotide
  modified_base 11: mod_base = OTHER; note = 2'-OMe modified nucleotide
  modified_base 13: mod_base = OTHER; note = 2'-OMe modified nucleotide
  modified_base 15: mod_base = OTHER; note = 2'-OMe modified nucleotide
  modified_base 17: mod_base = OTHER; note = 2'-OMe modified nucleotide
  modified_base 19: mod_base = OTHER; note = 2'-OMe modified nucleotide
  modified_base 2: mod_base = OTHER; note = 2-deoxy-2-fluoro ribonucleotide
  modified_base 4: mod_base = OTHER; note = 2-deoxy-2-fluoro ribonucleotide
  modified_base 6: mod_base = OTHER; note = 2-deoxy-2-fluoro ribonucleotide
  modified_base 8: mod_base = OTHER; note = 2-deoxy-2-fluoro ribonucleotide
  modified_base 10: mod_base = OTHER; note = 2-deoxy-2-fluoro ribonucleotide
  modified_base 12: mod_base = OTHER; note = 2-deoxy-2-fluoro ribonucleotide
  modified_base 14: mod_base = OTHER; note = 2-deoxy-2-fluoro ribonucleotide
  modified_base 16: mod_base = OTHER; note = 2-deoxy-2-fluoro ribonucleotide
  modified_base 18: mod_base = OTHER; note = 2-deoxy-2-fluoro ribonucleotide
  modified_base 20..21: mod_base = OTHER; note = phosphorothioate internucleotide linkage
  modified_base 1: mod_base = OTHER; note = Thymine
  modified_base 20..21: mod_base = OTHER; note = Thymine
tgtagcactcctgcacccctt

SEQ ID NO: 388 - RNA, 21 nt, synthetic construct
  source 1..21: mol_type = other RNA
  modified_base 1: mod_base = OTHER; note = 2'-deoxy nucleotide
  modified_base 20..21: mod_base = OTHER; note = 2'-deoxy nucleotide
  modified_base 3: mod_base = OTHER; note = 2'-OMe modified nucleotide
  modified_base 5: mod_base = OTHER; note = 2'-OMe modified nucleotide
  modified_base 7: mod_base = OTHER; note = 2'-OMe modified nucleotide
  modified_base 9: mod_base = OTHER; note = 2'-OMe modified nucleotide
  modified_base 11: mod_base = OTHER; note = 2'-OMe modified nucleotide
  modified_base 13: mod_base = OTHER; note = 2'-OMe modified nucleotide
  modified_base 15: mod_base = OTHER; note = 2'-OMe modified nucleotide
  modified_base 17: mod_base = OTHER; note = 2'-OMe modified nucleotide
  modified_base 19: mod_base = OTHER; note = 2'-OMe modified nucleotide
  modified_base 2: mod_base = OTHER; note = 2-deoxy-2-fluoro ribonucleotide
  modified_base 4: mod_base = OTHER; note = 2-deoxy-2-fluoro ribonucleotide
  modified_base 6: mod_base = OTHER; note = 2-deoxy-2-fluoro ribonucleotide
  modified_base 8: mod_base = OTHER; note = 2-deoxy-2-fluoro ribonucleotide
  modified_base 10: mod_base = OTHER; note = 2-deoxy-2-fluoro ribonucleotide
  modified_base 12: mod_base = OTHER; note = 2-deoxy-2-fluoro ribonucleotide
  modified_base 14: mod_base = OTHER; note = 2-deoxy-2-fluoro ribonucleotide
  modified_base 16: mod_base = OTHER; note = 2-deoxy-2-fluoro ribonucleotide
  modified_base 18: mod_base = OTHER; note = 2-deoxy-2-fluoro ribonucleotide
  modified_base 20..21: mod_base = OTHER; note = phosphorothioate internucleotide linkage
  modified_base 1: mod_base = OTHER; note = Thymine
  modified_base 20..21: mod_base = OTHER; note = Thymine
taataaggggctgccacagtt

SEQ ID NO: 389 - RNA, 21 nt, synthetic construct
  source 1..21: mol_type = other RNA
  modified_base 1: mod_base = OTHER; note = 2'-deoxy nucleotide
  modified_base 20..21: mod_base = OTHER; note = 2'-deoxy nucleotide
  modified_base 3: mod_base = OTHER; note = 2'-OMe modified nucleotide
  modified_base 5: mod_base = OTHER; note = 2'-OMe modified nucleotide
  modified_base 7: mod_base = OTHER; note = 2'-OMe modified nucleotide
  modified_base 9: mod_base = OTHER; note = 2'-OMe modified nucleotide
  modified_base 11: mod_base = OTHER; note = 2'-OMe modified nucleotide
  modified_base 13: mod_base = OTHER; note = 2'-OMe modified nucleotide
  modified_base 15: mod_base = OTHER; note = 2'-OMe modified nucleotide
  modified_base 17: mod_base = OTHER; note = 2'-OMe modified nucleotide
  modified_base 19: mod_base = OTHER; note = 2'-OMe modified nucleotide
  modified_base 2: mod_base = OTHER; note = 2-deoxy-2-fluoro ribonucleotide
  modified_base 4: mod_base = OTHER; note = 2-deoxy-2-fluoro ribonucleotide
  modified_base 6: mod_base = OTHER; note = 2-deoxy-2-fluoro ribonucleotide
  modified_base 8: mod_base = OTHER; note = 2-deoxy-2-fluoro ribonucleotide
  modified_base 10: mod_base = OTHER; note = 2-deoxy-2-fluoro ribonucleotide
  modified_base 12: mod_base = OTHER; note = 2-deoxy-2-fluoro ribonucleotide
  modified_base 14: mod_base = OTHER; note = 2-deoxy-2-fluoro ribonucleotide
  modified_base 16: mod_base = OTHER; note = 2-deoxy-2-fluoro ribonucleotide
  modified_base 18: mod_base = OTHER; note = 2-deoxy-2-fluoro ribonucleotide
  modified_base 20..21: mod_base = OTHER; note = phosphorothioate internucleotide linkage
  modified_base 1: mod_base = OTHER; note = Thymine
  modified_base 20..21: mod_base = OTHER; note = Thymine
ttaacaataaggggctgcctt

SEQ ID NO: 390 - RNA, 21 nt, synthetic construct
  source 1..21: mol_type = other RNA
  modified_base 1: mod_base = OTHER; note = 2'-deoxy nucleotide
  modified_base 20..21: mod_base = OTHER; note = 2'-deoxy nucleotide
  modified_base 3: mod_base = OTHER; note = 2'-OMe modified nucleotide
  modified_base 5: mod_base = OTHER; note = 2'-OMe modified nucleotide
  modified_base 7: mod_base = OTHER; note = 2'-OMe modified nucleotide
  modified_base 9: mod_base = OTHER; note = 2'-OMe modified nucleotide
  modified_base 11: mod_base = OTHER; note = 2'-OMe modified nucleotide
  modified_base 13: mod_base = OTHER; note = 2'-OMe modified nucleotide
  modified_base 15: mod_base = OTHER; note = 2'-OMe modified nucleotide
  modified_base 17: mod_base = OTHER; note = 2'-OMe modified nucleotide
  modified_base 19: mod_base = OTHER; note = 2'-OMe modified nucleotide
  modified_base 2: mod_base = OTHER; note = 2-deoxy-2-fluoro ribonucleotide
  modified_base 4: mod_base = OTHER; note = 2-deoxy-2-fluoro ribonucleotide
  modified_base 6: mod_base = OTHER; note = 2-deoxy-2-fluoro ribonucleotide
  modified_base 8: mod_base = OTHER; note = 2-deoxy-2-fluoro ribonucleotide
  modified_base 10: mod_base = OTHER; note = 2-deoxy-2-fluoro ribonucleotide
  modified_base 12: mod_base = OTHER; note = 2-deoxy-2-fluoro ribonucleotide
  modified_base 14: mod_base = OTHER; note = 2-deoxy-2-fluoro ribonucleotide
  modified_base 16: mod_base = OTHER; note = 2-deoxy-2-fluoro ribonucleotide
  modified_base 18: mod_base = OTHER; note = 2-deoxy-2-fluoro ribonucleotide
  modified_base 20..21: mod_base = OTHER; note = phosphorothioate internucleotide linkage
  modified_base 1: mod_base = OTHER; note = Thymine
  modified_base 20..21: mod_base = OTHER; note = Thymine
tgtataacaataaggggcttt

SEQ ID NO: 391 - RNA, 21 nt, synthetic construct
  source 1..21: mol_type = other RNA
  modified_base 1: mod_base = OTHER; note = 2'-deoxy nucleotide
  modified_base 20..21: mod_base = OTHER; note = 2'-deoxy nucleotide
  modified_base 3: mod_base = OTHER; note = 2'-OMe modified nucleotide
  modified_base 5: mod_base = OTHER; note = 2'-OMe modified nucleotide
  modified_base 7: mod_base = OTHER; note = 2'-OMe modified nucleotide
  modified_base 9: mod_base = OTHER; note = 2'-OMe modified nucleotide
  modified_base 11: mod_base = OTHER; note = 2'-OMe modified nucleotide
  modified_base 13: mod_base = OTHER; note = 2'-OMe modified nucleotide
  modified_base 15: mod_base = OTHER; note = 2'-OMe modified nucleotide
  modified_base 17: mod_base = OTHER; note = 2'-OMe modified nucleotide
  modified_base 19: mod_base = OTHER; note = 2'-OMe modified nucleotide
  modified_base 2: mod_base = OTHER; note = 2-deoxy-2-fluoro ribonucleotide
  modified_base 4: mod_base = OTHER; note = 2-deoxy-2-fluoro ribonucleotide
  modified_base 6: mod_base = OTHER; note = 2-deoxy-2-fluoro ribonucleotide
  modified_base 8: mod_base = OTHER; note = 2-deoxy-2-fluoro ribonucleotide
  modified_base 10: mod_base = OTHER; note = 2-deoxy-2-fluoro ribonucleotide
  modified_base 12: mod_base = OTHER; note = 2-deoxy-2-fluoro ribonucleotide
  modified_base 14: mod_base = OTHER; note = 2-deoxy-2-fluoro ribonucleotide
  modified_base 16: mod_base = OTHER; note = 2-deoxy-2-fluoro ribonucleotide
  modified_base 18: mod_base = OTHER; note = 2-deoxy-2-fluoro ribonucleotide
  modified_base 20..21: mod_base = OTHER; note = phosphorothioate internucleotide linkage
  modified_base 1: mod_base = OTHER; note = Thymine
  modified_base 20..21: mod_base = OTHER; note = Thymine
tcgtataacaataaggggctt

SEQ ID NO: 392 - RNA, 21 nt, synthetic construct
  source 1..21: mol_type = other RNA
  modified_base 1: mod_base = OTHER; note = 2'-deoxy nucleotide
  modified_base 20..21: mod_base = OTHER; note = 2'-deoxy nucleotide
  modified_base 3: mod_base = OTHER; note = 2'-OMe modified nucleotide
  modified_base 5: mod_base = OTHER; note = 2'-OMe modified nucleotide
  modified_base 7: mod_base = OTHER; note = 2'-OMe modified nucleotide
  modified_base 9: mod_base = OTHER; note = 2'-OMe modified nucleotide
  modified_base 11: mod_base = OTHER; note = 2'-OMe modified nucleotide
  modified_base 13: mod_base = OTHER; note = 2'-OMe modified nucleotide
  modified_base 15: mod_base = OTHER; note = 2'-OMe modified nucleotide
  modified_base 17: mod_base = OTHER; note = 2'-OMe modified nucleotide
  modified_base 19: mod_base = OTHER; note = 2'-OMe modified nucleotide
  modified_base 2: mod_base = OTHER; note = 2-deoxy-2-fluoro ribonucleotide
  modified_base 4: mod_base = OTHER; note = 2-deoxy-2-fluoro ribonucleotide
  modified_base 6: mod_base = OTHER; note = 2-deoxy-2-fluoro ribonucleotide
  modified_base 8: mod_base = OTHER; note = 2-deoxy-2-fluoro ribonucleotide
  modified_base 10: mod_base = OTHER; note = 2-deoxy-2-fluoro ribonucleotide
  modified_base 12: mod_base = OTHER; note = 2-deoxy-2-fluoro ribonucleotide
  modified_base 14: mod_base = OTHER; note = 2-deoxy-2-fluoro ribonucleotide
  modified_base 16: mod_base = OTHER; note = 2-deoxy-2-fluoro ribonucleotide
  modified_base 18: mod_base = OTHER; note = 2-deoxy-2-fluoro ribonucleotide
  modified_base 20..21: mod_base = OTHER; note = phosphorothioate internucleotide linkage
  modified_base 1: mod_base = OTHER; note = Thymine
  modified_base 20..21: mod_base = OTHER; note = Thymine
tcgtctgagcattgtgtcatt

SEQ ID NO: 393 - RNA, 21 nt, synthetic construct
  source 1..21: mol_type = other RNA
  modified_base 1: mod_base = OTHER; note = 2'-deoxy nucleotide
  modified_base 20..21: mod_base = OTHER; note = 2'-deoxy nucleotide
  modified_base 3: mod_base = OTHER; note = 2'-OMe modified nucleotide
  modified_base 5: mod_base = OTHER; note = 2'-OMe modified nucleotide
  modified_base 7: mod_base = OTHER; note = 2'-OMe modified nucleotide
  modified_base 9: mod_base = OTHER; note = 2'-OMe modified nucleotide
  modified_base 11: mod_base = OTHER; note = 2'-OMe modified nucleotide
  modified_base 13: mod_base = OTHER; note = 2'-OMe modified nucleotide
  modified_base 15: mod_base = OTHER; note = 2'-OMe modified nucleotide
  modified_base 17: mod_base = OTHER; note = 2'-OMe modified nucleotide
  modified_base 19: mod_base = OTHER; note = 2'-OMe modified nucleotide
  modified_base 2: mod_base = OTHER; note = 2-deoxy-2-fluoro ribonucleotide
  modified_base 4: mod_base = OTHER; note = 2-deoxy-2-fluoro ribonucleotide
  modified_base 6: mod_base = OTHER; note = 2-deoxy-2-fluoro ribonucleotide
  modified_base 8: mod_base = OTHER; note = 2-deoxy-2-fluoro ribonucleotide
  modified_base 10: mod_base = OTHER; note = 2-deoxy-2-fluoro ribonucleotide
  modified_base 12: mod_base = OTHER; note = 2-deoxy-2-fluoro ribonucleotide
  modified_base 14: mod_base = OTHER; note = 2-deoxy-2-fluoro ribonucleotide
  modified_base 16: mod_base = OTHER; note = 2-deoxy-2-fluoro ribonucleotide
  modified_base 18: mod_base = OTHER; note = 2-deoxy-2-fluoro ribonucleotide
  modified_base 20..21: mod_base = OTHER; note = phosphorothioate internucleotide linkage
  modified_base 1: mod_base = OTHER; note = Thymine
  modified_base 20..21: mod_base = OTHER; note = Thymine
tgcgtctgagcattgtgtctt

SEQ ID NO: 394 - RNA, 21 nt, synthetic construct
  source 1..21: mol_type = other RNA
  modified_base 1: mod_base = OTHER; note = 2'-deoxy nucleotide
  modified_base 20..21: mod_base = OTHER; note = 2'-deoxy nucleotide
  modified_base 3: mod_base = OTHER; note = 2'-OMe modified nucleotide
  modified_base 5: mod_base = OTHER; note = 2'-OMe modified nucleotide
  modified_base 7: mod_base = OTHER; note = 2'-OMe modified nucleotide
  modified_base 9: mod_base = OTHER; note = 2'-OMe modified nucleotide
  modified_base 11: mod_base = OTHER; note = 2'-OMe modified nucleotide
  modified_base 13: mod_base = OTHER; note = 2'-OMe modified nucleotide
  modified_base 15: mod_base = OTHER; note = 2'-OMe modified nucleotide
  modified_base 17: mod_base = OTHER; note = 2'-OMe modified nucleotide
  modified_base 19: mod_base = OTHER; note = 2'-OMe modified nucleotide
  modified_base 2: mod_base = OTHER; note = 2-deoxy-2-fluoro ribonucleotide
  modified_base 4: mod_base = OTHER; note = 2-deoxy-2-fluoro ribonucleotide
  modified_base 6: mod_base = OTHER; note = 2-deoxy-2-fluoro ribonucleotide
  modified_base 8: mod_base = OTHER; note = 2-deoxy-2-fluoro ribonucleotide
  modified_base 10: mod_base = OTHER; note = 2-deoxy-2-fluoro ribonucleotide
  modified_base 12: mod_base = OTHER; note = 2-deoxy-2-fluoro ribonucleotide
  modified_base 14: mod_base = OTHER; note = 2-deoxy-2-fluoro ribonucleotide
  modified_base 16: mod_base = OTHER; note = 2-deoxy-2-fluoro ribonucleotide
  modified_base 18: mod_base = OTHER; note = 2-deoxy-2-fluoro ribonucleotide
  modified_base 20..21: mod_base = OTHER; note = phosphorothioate internucleotide linkage
  modified_base 1: mod_base = OTHER; note = Thymine
  modified_base 20..21: mod_base = OTHER; note = Thymine
ttgcgtctgagcattgtgttt

SEQ ID NO: 395 - RNA, 21 nt, synthetic construct
  source 1..21: mol_type = other RNA
  modified_base 1: mod_base = OTHER; note = 2'-deoxy nucleotide
  modified_base 20..21: mod_base = OTHER; note = 2'-deoxy nucleotide
  modified_base 3: mod_base = OTHER; note = 2'-OMe modified nucleotide
  modified_base 5: mod_base = OTHER; note = 2'-OMe modified nucleotide
  modified_base 7: mod_base = OTHER; note = 2'-OMe modified nucleotide
  modified_base 9: mod_base = OTHER; note = 2'-OMe modified nucleotide
  modified_base 11: mod_base = OTHER; note = 2'-OMe modified nucleotide
  modified_base 13: mod_base = OTHER; note = 2'-OMe modified nucleotide
  modified_base 15: mod_base = OTHER; note = 2'-OMe modified nucleotide
  modified_base 17: mod_base = OTHER; note = 2'-OMe modified nucleotide
  modified_base 19: mod_base = OTHER; note = 2'-OMe modified nucleotide
  modified_base 2: mod_base = OTHER; note = 2-deoxy-2-fluoro ribonucleotide
  modified_base 4: mod_base = OTHER; note = 2-deoxy-2-fluoro ribonucleotide
  modified_base 6: mod_base = OTHER; note = 2-deoxy-2-fluoro ribonucleotide
  modified_base 8: mod_base = OTHER; note = 2-deoxy-2-fluoro ribonucleotide
  modified_base 10: mod_base = OTHER; note = 2-deoxy-2-fluoro ribonucleotide
  modified_base 12: mod_base = OTHER; note = 2-deoxy-2-fluoro ribonucleotide
  modified_base 14: mod_base = OTHER; note = 2-deoxy-2-fluoro ribonucleotide
  modified_base 16: mod_base = OTHER; note = 2-deoxy-2-fluoro ribonucleotide
  modified_base 18: mod_base = OTHER; note = 2-deoxy-2-fluoro ribonucleotide
  modified_base 20..21: mod_base = OTHER; note = phosphorothioate internucleotide linkage
  modified_base 1: mod_base = OTHER; note = Thymine
  modified_base 20..21: mod_base = OTHER; note = Thymine
ttctgcgtctgagcattgttt

SEQ ID NO: 396 - RNA, 21 nt, synthetic construct
  source 1..21: mol_type = other RNA
  modified_base 1: mod_base = OTHER; note = 2'-deoxy nucleotide
  modified_base 20..21: mod_base = OTHER; note = 2'-deoxy nucleotide
  modified_base 3: mod_base = OTHER; note = 2'-OMe modified nucleotide
  modified_base 5: mod_base = OTHER; note = 2'-OMe modified nucleotide
  modified_base 7: mod_base = OTHER; note = 2'-OMe modified nucleotide
  modified_base 9: mod_base = OTHER; note = 2'-OMe modified nucleotide
  modified_base 11: mod_base = OTHER; note = 2'-OMe modified nucleotide
  modified_base 13: mod_base = OTHER; note = 2'-OMe modified nucleotide
  modified_base 15: mod_base = OTHER; note = 2'-OMe modified nucleotide
  modified_base 17: mod_base = OTHER; note = 2'-OMe modified nucleotide
  modified_base 19: mod_base = OTHER; note = 2'-OMe modified nucleotide
  modified_base 2: mod_base = OTHER; note = 2-deoxy-2-fluoro ribonucleotide
  modified_base 4: mod_base = OTHER; note = 2-deoxy-2-fluoro ribonucleotide
  modified_base 6: mod_base = OTHER; note = 2-deoxy-2-fluoro ribonucleotide
  modified_base 8: mod_base = OTHER; note = 2-deoxy-2-fluoro ribonucleotide
  modified_base 10: mod_base = OTHER; note = 2-deoxy-2-fluoro ribonucleotide
  modified_base 12: mod_base = OTHER; note = 2-deoxy-2-fluoro ribonucleotide
  modified_base 14: mod_base = OTHER; note = 2-deoxy-2-fluoro ribonucleotide
  modified_base 16: mod_base = OTHER; note = 2-deoxy-2-fluoro ribonucleotide
  modified_base 18: mod_base = OTHER; note = 2-deoxy-2-fluoro ribonucleotide
  modified_base 20..21: mod_base = OTHER; note = phosphorothioate internucleotide linkage
  modified_base 1: mod_base = OTHER; note = Thymine
  modified_base 20..21: mod_base = OTHER; note = Thymine
tggatctggatttcggcagtt

SEQ ID NO: 397 - RNA, 21 nt, synthetic construct
  source 1..21: mol_type = other RNA
  modified_base 1: mod_base = OTHER; note = 2'-deoxy nucleotide
  modified_base 20..21: mod_base = OTHER; note = 2'-deoxy nucleotide
  modified_base 3: mod_base = OTHER; note = 2'-OMe modified nucleotide
  modified_base 5: mod_base = OTHER; note = 2'-OMe modified nucleotide
  modified_base 7: mod_base = OTHER; note = 2'-OMe modified nucleotide
  modified_base 9: mod_base = OTHER; note = 2'-OMe modified nucleotide
  modified_base 11: mod_base = OTHER; note = 2'-OMe modified nucleotide
  modified_base 13: mod_base = OTHER; note = 2'-OMe modified nucleotide
  modified_base 15: mod_base = OTHER; note = 2'-OMe modified nucleotide
  modified_base 17: mod_base = OTHER; note = 2'-OMe modified nucleotide
  modified_base 19: mod_base = OTHER; note = 2'-OMe modified nucleotide
  modified_base 2: mod_base = OTHER; note = 2-deoxy-2-fluoro ribonucleotide
  modified_base 4: mod_base = OTHER; note = 2-deoxy-2-fluoro ribonucleotide
  modified_base 6: mod_base = OTHER; note = 2-deoxy-2-fluoro ribonucleotide
  modified_base 8: mod_base = OTHER; note = 2-deoxy-2-fluoro ribonucleotide
  modified_base 10: mod_base = OTHER; note = 2-deoxy-2-fluoro ribonucleotide
  modified_base 12: mod_base = OTHER; note = 2-deoxy-2-fluoro ribonucleotide
  modified_base 14: mod_base = OTHER; note = 2-deoxy-2-fluoro ribonucleotide
  modified_base 16: mod_base = OTHER; note = 2-deoxy-2-fluoro ribonucleotide
  modified_base 18: mod_base = OTHER; note = 2-deoxy-2-fluoro ribonucleotide
  modified_base 20..21: mod_base = OTHER; note = phosphorothioate internucleotide linkage
  modified_base 1: mod_base = OTHER; note = Thymine
  modified_base 20..21: mod_base = OTHER; note = Thymine
tcaggatctggatttcggctt

SEQ ID NO: 398 - RNA, 21 nt, synthetic construct
  source 1..21: mol_type = other RNA
  modified_base 1: mod_base = OTHER; note = 2'-deoxy nucleotide
  modified_base 20..21: mod_base = OTHER; note = 2'-deoxy nucleotide
  modified_base 3: mod_base = OTHER; note = 2'-OMe modified nucleotide
  modified_base 5: mod_base = OTHER; note = 2'-OMe modified nucleotide
  modified_base 7: mod_base = OTHER; note = 2'-OMe modified nucleotide
  modified_base 9: mod_base = OTHER; note = 2'-OMe modified nucleotide
  modified_base 11: mod_base = OTHER; note = 2'-OMe modified nucleotide
  modified_base 13: mod_base = OTHER; note = 2'-OMe modified nucleotide
  modified_base 15: mod_base = OTHER; note = 2'-OMe modified nucleotide
  modified_base 17: mod_base = OTHER; note = 2'-OMe modified nucleotide
  modified_base 19: mod_base = OTHER; note = 2'-OMe modified nucleotide
  modified_base 2: mod_base = OTHER; note = 2-deoxy-2-fluoro ribonucleotide
  modified_base 4: mod_base = OTHER; note = 2-deoxy-2-fluoro ribonucleotide
  modified_base 6: mod_base = OTHER; note = 2-deoxy-2-fluoro ribonucleotide
  modified_base 8: mod_base = OTHER; note = 2-deoxy-2-fluoro ribonucleotide
  modified_base 10: mod_base = OTHER; note = 2-deoxy-2-fluoro ribonucleotide
  modified_base 12: mod_base = OTHER; note = 2-deoxy-2-fluoro ribonucleotide
  modified_base 14: mod_base = OTHER; note = 2-deoxy-2-fluoro ribonucleotide
  modified_base 16: mod_base = OTHER; note = 2-deoxy-2-fluoro ribonucleotide
  modified_base 18: mod_base = OTHER; note = 2-deoxy-2-fluoro ribonucleotide
  modified_base 20..21: mod_base = OTHER; note = phosphorothioate internucleotide linkage
  modified_base 1: mod_base = OTHER; note = Thymine
  modified_base 20..21: mod_base = OTHER; note = Thymine
tcatctgagcatcgtgtcatt

SEQ ID NO: 399 - RNA, 21 nt, synthetic construct
  source 1..21: mol_type = other RNA
  modified_base 1: mod_base = OTHER; note = 2'-deoxy nucleotide
  modified_base 20..21: mod_base = OTHER; note = 2'-deoxy nucleotide
  modified_base 3: mod_base = OTHER; note = 2'-OMe modified nucleotide
  modified_base 5: mod_base = OTHER; note = 2'-OMe modified nucleotide
  modified_base 7: mod_base = OTHER; note = 2'-OMe modified nucleotide
  modified_base 9: mod_base = OTHER; note = 2'-OMe modified nucleotide
  modified_base 11: mod_base = OTHER; note = 2'-OMe modified nucleotide
  modified_base 13: mod_base = OTHER; note = 2'-OMe modified nucleotide
  modified_base 15: mod_base = OTHER; note = 2'-OMe modified nucleotide
  modified_base 17: mod_base = OTHER; note = 2'-OMe modified nucleotide
  modified_base 19: mod_base = OTHER; note = 2'-OMe modified nucleotide
  modified_base 2: mod_base = OTHER; note = 2-deoxy-2-fluoro ribonucleotide
  modified_base 4: mod_base = OTHER; note = 2-deoxy-2-fluoro ribonucleotide
  modified_base 6: mod_base = OTHER; note = 2-deoxy-2-fluoro ribonucleotide
  modified_base 8: mod_base = OTHER; note = 2-deoxy-2-fluoro ribonucleotide
  modified_base 10: mod_base = OTHER; note = 2-deoxy-2-fluoro ribonucleotide
  modified_base 12: mod_base = OTHER; note = 2-deoxy-2-fluoro ribonucleotide
  modified_base 14: mod_base = OTHER; note = 2-deoxy-2-fluoro ribonucleotide
  modified_base 16: mod_base = OTHER; note = 2-deoxy-2-fluoro ribonucleotide
  modified_base 18: mod_base = OTHER; note = 2-deoxy-2-fluoro ribonucleotide
  modified_base 20..21: mod_base = OTHER; note = phosphorothioate internucleotide linkage
  modified_base 1: mod_base = OTHER; note = Thymine
  modified_base 20..21: mod_base = OTHER; note = Thymine
tgcatctgagcatcgtgtctt

SEQ ID NO: 400 - RNA, 21 nt, synthetic construct
  source 1..21: mol_type = other RNA
  modified_base 1: mod_base = OTHER; note = 2'-deoxy nucleotide
  modified_base 20..21: mod_base = OTHER; note = 2'-deoxy nucleotide
  modified_base 3: mod_base = OTHER; note = 2'-OMe modified nucleotide
  modified_base 5: mod_base = OTHER; note = 2'-OMe modified nucleotide
  modified_base 7: mod_base = OTHER; note = 2'-OMe modified nucleotide
  modified_base 9: mod_base = OTHER; note = 2'-OMe modified nucleotide
  modified_base 11: mod_base = OTHER; note = 2'-OMe modified nucleotide
  modified_base 13: mod_base = OTHER; note = 2'-OMe modified nucleotide
  modified_base 15: mod_base = OTHER; note = 2'-OMe modified nucleotide
  modified_base 17: mod_base = OTHER; note = 2'-OMe modified nucleotide
  modified_base 19: mod_base = OTHER; note = 2'-OMe modified nucleotide
  modified_base 2: mod_base = OTHER; note = 2-deoxy-2-fluoro ribonucleotide
  modified_base 4: mod_base = OTHER; note = 2-deoxy-2-fluoro ribonucleotide
  modified_base 6: mod_base = OTHER; note = 2-deoxy-2-fluoro ribonucleotide
  modified_base 8: mod_base = OTHER; note = 2-deoxy-2-fluoro ribonucleotide
  modified_base 10: mod_base = OTHER; note = 2-deoxy-2-fluoro ribonucleotide
  modified_base 12: mod_base = OTHER; note = 2-deoxy-2-fluoro ribonucleotide
  modified_base 14: mod_base = OTHER; note = 2-deoxy-2-fluoro ribonucleotide
  modified_base 16: mod_base = OTHER; note = 2-deoxy-2-fluoro ribonucleotide
  modified_base 18: mod_base = OTHER; note = 2-deoxy-2-fluoro ribonucleotide
  modified_base 20..21: mod_base = OTHER; note = phosphorothioate internucleotide linkage
  modified_base 1: mod_base = OTHER; note = Thymine
  modified_base 20..21: mod_base = OTHER; note = Thymine
ttgcatctgagcatcgtgttt

SEQ ID NO: 401 - RNA, 21 nt, synthetic construct
  source 1..21: mol_type = other RNA
  modified_base 1: mod_base = OTHER; note = 2'-deoxy nucleotide
  modified_base 20..21: mod_base = OTHER; note = 2'-deoxy nucleotide
  modified_base 3: mod_base = OTHER; note = 2'-OMe modified nucleotide
  modified_base 5: mod_base = OTHER; note = 2'-OMe modified nucleotide
  modified_base 7: mod_base = OTHER; note = 2'-OMe modified nucleotide
  modified_base 9: mod_base = OTHER; note = 2'-OMe modified nucleotide
  modified_base 11: mod_base = OTHER; note = 2'-OMe modified nucleotide
  modified_base 13: mod_base = OTHER; note = 2'-OMe modified nucleotide
  modified_base 15: mod_base = OTHER; note = 2'-OMe modified nucleotide
  modified_base 17: mod_base = OTHER; note = 2'-OMe modified nucleotide
  modified_base 19: mod_base = OTHER; note = 2'-OMe modified nucleotide
  modified_base 2: mod_base = OTHER; note = 2-deoxy-2-fluoro ribonucleotide
  modified_base 4: mod_base = OTHER; note = 2-deoxy-2-fluoro ribonucleotide
  modified_base 6: mod_base = OTHER; note = 2-deoxy-2-fluoro ribonucleotide
  modified_base 8: mod_base = OTHER; note = 2-deoxy-2-fluoro ribonucleotide
  modified_base 10: mod_base = OTHER; note = 2-deoxy-2-fluoro ribonucleotide
  modified_base 12: mod_base = OTHER; note = 2-deoxy-2-fluoro ribonucleotide
  modified_base 14: mod_base = OTHER; note = 2-deoxy-2-fluoro ribonucleotide
  modified_base 16: mod_base = OTHER; note = 2-deoxy-2-fluoro ribonucleotide
  modified_base 18: mod_base = OTHER; note = 2-deoxy-2-fluoro ribonucleotide
  modified_base 20..21: mod_base = OTHER; note = phosphorothioate internucleotide linkage
  modified_base 1: mod_base = OTHER; note = Thymine
  modified_base 20..21: mod_base = OTHER; note = Thymine
ttctgcatctgagcatcgttt

SEQ ID NO: 402 - RNA, 21 nt, synthetic construct
  source 1..21: mol_type = other RNA
  modified_base 1: mod_base = OTHER; note = 2'-deoxy nucleotide
  modified_base 20..21: mod_base = OTHER; note = 2'-deoxy nucleotide
  modified_base 3: mod_base = OTHER; note = 2'-OMe modified nucleotide
  modified_base 5: mod_base = OTHER; note = 2'-OMe modified nucleotide
  modified_base 7: mod_base = OTHER; note = 2'-OMe modified nucleotide
  modified_base 9: mod_base = OTHER; note = 2'-OMe modified nucleotide
  modified_base 11: mod_base = OTHER; note = 2'-OMe modified nucleotide
  modified_base 13: mod_base = OTHER; note = 2'-OMe modified nucleotide
  modified_base 15: mod_base = OTHER; note = 2'-OMe modified nucleotide
  modified_base 17: mod_base = OTHER; note = 2'-OMe modified nucleotide
  modified_base 19: mod_base = OTHER; note = 2'-OMe modified nucleotide
  modified_base 2: mod_base = OTHER; note = 2-deoxy-2-fluoro ribonucleotide
  modified_base 4: mod_base = OTHER; note = 2-deoxy-2-fluoro ribonucleotide
  modified_base 6: mod_base = OTHER; note = 2-deoxy-2-fluoro ribonucleotide
  modified_base 8: mod_base = OTHER; note = 2-deoxy-2-fluoro ribonucleotide
  modified_base 10: mod_base = OTHER; note = 2-deoxy-2-fluoro ribonucleotide
  modified_base 12: mod_base = OTHER; note = 2-deoxy-2-fluoro ribonucleotide
  modified_base 14: mod_base = OTHER; note = 2-deoxy-2-fluoro ribonucleotide
  modified_base 16: mod_base = OTHER; note = 2-deoxy-2-fluoro ribonucleotide
  modified_base 18: mod_base = OTHER; note = 2-deoxy-2-fluoro ribonucleotide
  modified_base 20..21: mod_base = OTHER; note = phosphorothioate internucleotide linkage
  modified_base 1: mod_base = OTHER; note = Thymine
  modified_base 20..21: mod_base = OTHER; note = Thymine
taaagcctctaggcttggatt

SEQ ID NO: 403 - RNA, 21 nt, synthetic construct
  source 1..21: mol_type = other RNA
  modified_base 1: mod_base = OTHER; note = 2'-deoxy nucleotide
  modified_base 20..21: mod_base = OTHER; note = 2'-deoxy nucleotide
  modified_base 3: mod_base = OTHER; note = 2'-OMe modified nucleotide
  modified_base 5: mod_base = OTHER; note = 2'-OMe modified nucleotide
  modified_base 7: mod_base = OTHER; note = 2'-OMe modified nucleotide
  modified_base 9: mod_base = OTHER; note = 2'-OMe modified nucleotide
  modified_base 11: mod_base = OTHER; note = 2'-OMe modified nucleotide
  modified_base 13: mod_base = OTHER; note = 2'-OMe modified nucleotide
  modified_base 15: mod_base = OTHER; note = 2'-OMe modified nucleotide
  modified_base 17: mod_base = OTHER; note = 2'-OMe modified nucleotide
  modified_base 19: mod_base = OTHER; note = 2'-OMe modified nucleotide
  modified_base 2: mod_base = OTHER; note = 2-deoxy-2-fluoro ribonucleotide
  modified_base 4: mod_base = OTHER; note = 2-deoxy-2-fluoro ribonucleotide
  modified_base 6: mod_base = OTHER; note = 2-deoxy-2-fluoro ribonucleotide
  modified_base 8: mod_base = OTHER; note = 2-deoxy-2-fluoro ribonucleotide
  modified_base 10: mod_base = OTHER; note = 2-deoxy-2-fluoro ribonucleotide
  modified_base 12: mod_base = OTHER; note = 2-deoxy-2-fluoro ribonucleotide
  modified_base 14: mod_base = OTHER; note = 2-deoxy-2-fluoro ribonucleotide
  modified_base 16: mod_base = OTHER; note = 2-deoxy-2-fluoro ribonucleotide
  modified_base 18: mod_base = OTHER; note = 2-deoxy-2-fluoro ribonucleotide
  modified_base 20..21: mod_base = OTHER; note = phosphorothioate internucleotide linkage
  modified_base 1: mod_base = OTHER; note = Thymine
  modified_base 20..21: mod_base = OTHER; note = Thymine
tgtaccccgggggtttccttt

SEQ ID NO: 404 - RNA, 21 nt, synthetic construct
  source 1..21: mol_type = other RNA
  modified_base 1: mod_base = OTHER; note = 2'-deoxy nucleotide
  modified_base 20..21: mod_base = OTHER; note = 2'-deoxy nucleotide
  modified_base 3: mod_base = OTHER; note = 2'-OMe modified nucleotide
  modified_base 5: mod_base = OTHER; note = 2'-OMe modified nucleotide
  modified_base 7: mod_base = OTHER; note = 2'-OMe modified nucleotide
  modified_base 9: mod_base = OTHER; note = 2'-OMe modified nucleotide
  modified_base 11: mod_base = OTHER; note = 2'-OMe modified nucleotide
  modified_base 13: mod_base = OTHER; note = 2'-OMe modified nucleotide
  modified_base 15: mod_base = OTHER; note = 2'-OMe modified nucleotide
  modified_base 17: mod_base = OTHER; note = 2'-OMe modified nucleotide
  modified_base 19: mod_base = OTHER; note = 2'-OMe modified nucleotide
  modified_base 2: mod_base = OTHER; note = 2-deoxy-2-fluoro ribonucleotide
  modified_base 4: mod_base = OTHER; note = 2-deoxy-2-fluoro ribonucleotide
  modified_base 6: mod_base = OTHER; note = 2-deoxy-2-fluoro ribonucleotide
  modified_base 8: mod_base = OTHER; note = 2-deoxy-2-fluoro ribonucleotide
  modified_base 10: mod_base = OTHER; note = 2-deoxy-2-fluoro ribonucleotide
  modified_base 12: mod_base = OTHER; note = 2-deoxy-2-fluoro ribonucleotide
  modified_base 14: mod_base = OTHER; note = 2-deoxy-2-fluoro ribonucleotide
  modified_base 16: mod_base = OTHER; note = 2-deoxy-2-fluoro ribonucleotide
  modified_base 18: mod_base = OTHER; note = 2-deoxy-2-fluoro ribonucleotide
  modified_base 20..21: mod_base = OTHER; note = phosphorothioate internucleotide linkage
  modified_base 1: mod_base = OTHER; note = Thymine
  modified_base 20..21: mod_base = OTHER; note = Thymine
ttgtaccccgggggtttcctt

SEQ ID NO: 405 - RNA, 21 nt, synthetic construct
  source 1..21: mol_type = other RNA
  modified_base 1: mod_base = OTHER; note = 2'-deoxy nucleotide
  modified_base 20..21: mod_base = OTHER; note = 2'-deoxy nucleotide
  modified_base 3: mod_base = OTHER; note = 2'-OMe modified nucleotide
  modified_base 5: mod_base = OTHER; note = 2'-OMe modified nucleotide
  modified_base 7: mod_base = OTHER; note = 2'-OMe modified nucleotide
  modified_base 9: mod_base = OTHER; note = 2'-OMe modified nucleotide
  modified_base 11: mod_base = OTHER; note = 2'-OMe modified nucleotide
  modified_base 13: mod_base = OTHER; note = 2'-OMe modified nucleotide
  modified_base 15: mod_base = OTHER; note = 2'-OMe modified nucleotide
  modified_base 17: mod_base = OTHER; note = 2'-OMe modified nucleotide
  modified_base 19: mod_base = OTHER; note = 2'-OMe modified nucleotide
  modified_base 2: mod_base = OTHER; note = 2-deoxy-2-fluoro ribonucleotide
  modified_base 4: mod_base = OTHER; note = 2-deoxy-2-fluoro ribonucleotide
  modified_base 6: mod_base = OTHER; note = 2-deoxy-2-fluoro ribonucleotide
  modified_base 8: mod_base = OTHER; note = 2-deoxy-2-fluoro ribonucleotide
  modified_base 10: mod_base = OTHER; note = 2-deoxy-2-fluoro ribonucleotide
  modified_base 12: mod_base = OTHER; note = 2-deoxy-2-fluoro ribonucleotide
  modified_base 14: mod_base = OTHER; note = 2-deoxy-2-fluoro ribonucleotide
  modified_base 16: mod_base = OTHER; note = 2-deoxy-2-fluoro ribonucleotide
  modified_base 18: mod_base = OTHER; note = 2-deoxy-2-fluoro ribonucleotide
  modified_base 20..21: mod_base = OTHER; note = phosphorothioate internucleotide linkage
  modified_base 1: mod_base = OTHER; note = Thymine
  modified_base 20..21: mod_base = OTHER; note = Thymine
tctgtaccccgggggtttctt

SEQ ID NO: 406 - RNA, 21 nt, synthetic construct
  source 1..21: mol_type = other RNA
  modified_base 1: mod_base = OTHER; note = 2'-deoxy nucleotide
  modified_base 20..21: mod_base = OTHER; note = 2'-deoxy nucleotide
  modified_base 3: mod_base = OTHER; note = 2'-OMe modified nucleotide
  modified_base 5: mod_base = OTHER; note = 2'-OMe modified nucleotide
  modified_base 7: mod_base = OTHER; note = 2'-OMe modified nucleotide
  modified_base 9: mod_base = OTHER; note = 2'-OMe modified nucleotide
  modified_base 11: mod_base = OTHER; note = 2'-OMe modified nucleotide
  modified_base 13: mod_base = OTHER; note = 2'-OMe modified nucleotide
  modified_base 15: mod_base = OTHER; note = 2'-OMe modified nucleotide
  modified_base 17: mod_base = OTHER; note = 2'-OMe modified nucleotide
  modified_base 19: mod_base = OTHER; note = 2'-OMe modified nucleotide
  modified_base 2: mod_base = OTHER; note = 2-deoxy-2-fluoro ribonucleotide
  modified_base 4: mod_base = OTHER; note = 2-deoxy-2-fluoro ribonucleotide
  modified_base 6: mod_base = OTHER; note = 2-deoxy-2-fluoro ribonucleotide
  modified_base 8: mod_base = OTHER; note = 2-deoxy-2-fluoro ribonucleotide
  modified_base 10: mod_base = OTHER; note = 2-deoxy-2-fluoro ribonucleotide
  modified_base 12: mod_base = OTHER; note = 2-deoxy-2-fluoro ribonucleotide
  modified_base 14: mod_base = OTHER; note = 2-deoxy-2-fluoro ribonucleotide
  modified_base 16: mod_base = OTHER; note = 2-deoxy-2-fluoro ribonucleotide
  modified_base 18: mod_base = OTHER; note = 2-deoxy-2-fluoro ribonucleotide
  modified_base 20..21: mod_base = OTHER; note = phosphorothioate internucleotide linkage
  modified_base 1: mod_base = OTHER; note = Thymine
  modified_base 20..21: mod_base = OTHER; note = Thymine
ttccataatggtagtagcatt

SEQ ID NO: 407 - RNA, 21 nt, synthetic construct
  source 1..21: mol_type = other RNA
  modified_base 1: mod_base = OTHER; note = 2'-deoxy nucleotide
  modified_base 20..21: mod_base = OTHER; note = 2'-deoxy nucleotide
  modified_base 3: mod_base = OTHER; note = 2'-OMe modified nucleotide
  modified_base 5: mod_base = OTHER; note = 2'-OMe modified nucleotide
  modified_base 7: mod_base = OTHER; note = 2'-OMe modified nucleotide
  modified_base 9: mod_base = OTHER; note = 2'-OMe modified nucleotide
  modified_base 11: mod_base = OTHER; note = 2'-OMe modified nucleotide
  modified_base 13: mod_base = OTHER; note = 2'-OMe modified nucleotide
  modified_base 15: mod_base = OTHER; note = 2'-OMe modified nucleotide
  modified_base 17: mod_base = OTHER; note = 2'-OMe modified nucleotide
  modified_base 19: mod_base = OTHER; note = 2'-OMe modified nucleotide
  modified_base 2: mod_base = OTHER; note = 2-deoxy-2-fluoro ribonucleotide
  modified_base 4: mod_base = OTHER; note = 2-deoxy-2-fluoro ribonucleotide
  modified_base 6: mod_base = OTHER; note = 2-deoxy-2-fluoro ribonucleotide
  modified_base 8: mod_base = OTHER; note = 2-deoxy-2-fluoro ribonucleotide
  modified_base 10: mod_base = OTHER; note = 2-deoxy-2-fluoro ribonucleotide
  modified_base 12: mod_base = OTHER; note = 2-deoxy-2-fluoro ribonucleotide
  modified_base 14: mod_base = OTHER; note = 2-deoxy-2-fluoro ribonucleotide
  modified_base 16: mod_base = OTHER; note = 2-deoxy-2-fluoro ribonucleotide
  modified_base 18: mod_base = OTHER; note = 2-deoxy-2-fluoro ribonucleotide
  modified_base 20..21: mod_base = OTHER; note = phosphorothioate internucleotide linkage
  modified_base 1: mod_base = OTHER; note = Thymine
  modified_base 20..21: mod_base = OTHER; note = Thymine
tgtccataatggtagtagctt

SEQ ID NO: 408 - RNA, 21 nt, synthetic construct
  source 1..21: mol_type = other RNA
  modified_base 1: mod_base = OTHER; note = 2'-deoxy nucleotide
  modified_base 20..21: mod_base = OTHER; note = 2'-deoxy nucleotide
  modified_base 3: mod_base = OTHER; note = 2'-OMe modified nucleotide
  modified_base 5: mod_base = OTHER; note = 2'-OMe modified nucleotide
  modified_base 7: mod_base = OTHER; note = 2'-OMe modified nucleotide
  modified_base 9: mod_base = OTHER; note = 2'-OMe modified nucleotide
  modified_base 11: mod_base = OTHER; note = 2'-OMe modified nucleotide
  modified_base 13: mod_base = OTHER; note = 2'-OMe modified nucleotide
  modified_base 15: mod_base = OTHER; note = 2'-OMe modified nucleotide
  modified_base 17: mod_base = OTHER; note = 2'-OMe modified nucleotide
  modified_base 19: mod_base = OTHER; note = 2'-OMe modified nucleotide
  modified_base 2: mod_base = OTHER; note = 2-deoxy-2-fluoro ribonucleotide
  modified_base 4: mod_base = OTHER; note = 2-deoxy-2-fluoro ribonucleotide
  modified_base 6: mod_base = OTHER; note = 2-deoxy-2-fluoro ribonucleotide
  modified_base 8: mod_base = OTHER; note = 2-deoxy-2-fluoro ribonucleotide
  modified_base 10: mod_base = OTHER; note = 2-deoxy-2-fluoro ribonucleotide
  modified_base 12: mod_base = OTHER; note = 2-deoxy-2-fluoro ribonucleotide
  modified_base 14: mod_base = OTHER; note = 2-deoxy-2-fluoro ribonucleotide
  modified_base 16: mod_base = OTHER; note = 2-deoxy-2-fluoro ribonucleotide
  modified_base 18: mod_base = OTHER; note = 2-deoxy-2-fluoro ribonucleotide
  modified_base 20..21: mod_base = OTHER; note = phosphorothioate internucleotide linkage
  modified_base 1: mod_base = OTHER; note = Thymine
  modified_base 20..21: mod_base = OTHER; note = Thymine
tctctgtccataatggtagtt

SEQ ID NO: 409 - RNA, 21 nt, synthetic construct
  source 1..21: mol_type = other RNA
  modified_base 1: mod_base = OTHER; note = 2'-deoxy nucleotide
  modified_base 20..21: mod_base = OTHER; note = 2'-deoxy nucleotide
  modified_base 3: mod_base = OTHER; note = 2'-OMe modified nucleotide
  modified_base 5: mod_base = OTHER; note = 2'-OMe modified nucleotide
  modified_base 7: mod_base = OTHER; note = 2'-OMe modified nucleotide
  modified_base 9: mod_base = OTHER; note = 2'-OMe modified nucleotide
  modified_base 11: mod_base = OTHER; note = 2'-OMe modified nucleotide
  modified_base 13: mod_base = OTHER; note = 2'-OMe modified nucleotide
  modified_base 15: mod_base = OTHER; note = 2'-OMe modified nucleotide
  modified_base 17: mod_base = OTHER; note = 2'-OMe modified nucleotide
  modified_base 19: mod_base = OTHER; note = 2'-OMe modified nucleotide
  modified_base 2: mod_base = OTHER; note = 2-deoxy-2-fluoro ribonucleotide
  modified_base 4: mod_base = OTHER; note = 2-deoxy-2-fluoro ribonucleotide
  modified_base 6: mod_base = OTHER; note = 2-deoxy-2-fluoro ribonucleotide
  modified_base 8: mod_base = OTHER; note = 2-deoxy-2-fluoro ribonucleotide
  modified_base 10: mod_base = OTHER; note = 2-deoxy-2-fluoro ribonucleotide
  modified_base 12: mod_base = OTHER; note = 2-deoxy-2-fluoro ribonucleotide
  modified_base 14: mod_base = OTHER; note = 2-deoxy-2-fluoro ribonucleotide
  modified_base 16: mod_base = OTHER; note = 2-deoxy-2-fluoro ribonucleotide
  modified_base 18: mod_base = OTHER; note = 2-deoxy-2-fluoro ribonucleotide
  modified_base 20..21: mod_base = OTHER; note = phosphorothioate internucleotide linkage
  modified_base 1: mod_base = OTHER; note = Thymine
  modified_base 20..21: mod_base = OTHER; note = Thymine
tcgactatgctggtgtggttt

SEQ ID NO: 410 - RNA, 21 nt, synthetic construct
  source 1..21: mol_type = other RNA
  modified_base 1: mod_base = OTHER; note = 2'-deoxy nucleotide
  modified_base 20..21: mod_base = OTHER; note = 2'-deoxy nucleotide
  modified_base 3: mod_base = OTHER; note = 2'-OMe modified nucleotide
  modified_base 5: mod_base = OTHER; note = 2'-OMe modified nucleotide
  modified_base 7: mod_base = OTHER; note = 2'-OMe modified nucleotide
  modified_base 9: mod_base = OTHER; note = 2'-OMe modified nucleotide
  modified_base 11: mod_base = OTHER; note = 2'-OMe modified nucleotide
  modified_base 13: mod_base = OTHER; note = 2'-OMe modified nucleotide
  modified_base 15: mod_base = OTHER; note = 2'-OMe modified nucleotide
  modified_base 17: mod_base = OTHER; note = 2'-OMe modified nucleotide
  modified_base 19: mod_base = OTHER; note = 2'-OMe modified nucleotide
  modified_base 2: mod_base = OTHER; note = 2-deoxy-2-fluoro ribonucleotide
  modified_base 4: mod_base = OTHER; note = 2-deoxy-2-fluoro ribonucleotide
  modified_base 6: mod_base = OTHER; note = 2-deoxy-2-fluoro ribonucleotide
  modified_base 8: mod_base = OTHER; note = 2-deoxy-2-fluoro ribonucleotide
  modified_base 10: mod_base = OTHER; note = 2-deoxy-2-fluoro ribonucleotide
  modified_base 12: mod_base = OTHER; note = 2-deoxy-2-fluoro ribonucleotide
  modified_base 14: mod_base = OTHER; note = 2-deoxy-2-fluoro ribonucleotide
  modified_base 16: mod_base = OTHER; note = 2-deoxy-2-fluoro ribonucleotide
  modified_base 18: mod_base = OTHER; note = 2-deoxy-2-fluoro ribonucleotide
  modified_base 20..21: mod_base = OTHER; note = phosphorothioate internucleotide linkage
  modified_base 1: mod_base = OTHER; note = Thymine
  modified_base 20..21: mod_base = OTHER; note = Thymine
tccgactatgctggtgtggtt

SEQ ID NO: 411 - RNA, 21 nt, synthetic construct
  source 1..21: mol_type = other RNA
  modified_base 1: mod_base = OTHER; note = 2'-deoxy nucleotide
  modified_base 20..21: mod_base = OTHER; note = 2'-deoxy nucleotide
  modified_base 3: mod_base = OTHER; note = 2'-OMe modified nucleotide
  modified_base 5: mod_base = OTHER; note = 2'-OMe modified nucleotide
  modified_base 7: mod_base = OTHER; note = 2'-OMe modified nucleotide
  modified_base 9: mod_base = OTHER; note = 2'-OMe modified nucleotide
  modified_base 11: mod_base = OTHER; note = 2'-OMe modified nucleotide
  modified_base 13: mod_base = OTHER; note = 2'-OMe modified nucleotide
  modified_base 15: mod_base = OTHER; note = 2'-OMe modified nucleotide
  modified_base 17: mod_base = OTHER; note = 2'-OMe modified nucleotide
  modified_base 19: mod_base = OTHER; note = 2'-OMe modified nucleotide
  modified_base 2: mod_base = OTHER; note = 2-deoxy-2-fluoro ribonucleotide
  modified_base 4: mod_base = OTHER; note = 2-deoxy-2-fluoro ribonucleotide
  modified_base 6: mod_base = OTHER; note = 2-deoxy-2-fluoro ribonucleotide
  modified_base 8: mod_base = OTHER; note = 2-deoxy-2-fluoro ribonucleotide
  modified_base 10: mod_base = OTHER; note = 2-deoxy-2-fluoro ribonucleotide
  modified_base 12: mod_base = OTHER; note = 2-deoxy-2-fluoro ribonucleotide
  modified_base 14: mod_base = OTHER; note = 2-deoxy-2-fluoro ribonucleotide
  modified_base 16: mod_base = OTHER; note = 2-deoxy-2-fluoro ribonucleotide
  modified_base 18: mod_base = OTHER; note = 2-deoxy-2-fluoro ribonucleotide
  modified_base 20..21: mod_base = OTHER; note = phosphorothioate internucleotide linkage
  modified_base 1: mod_base = OTHER; note = Thymine
  modified_base 20..21: mod_base = OTHER; note = Thymine
ttccgactatgctggtgtgtt

SEQ ID NO: 412 - RNA, 21 nt, synthetic construct
  source 1..21: mol_type = other RNA
  modified_base 1: mod_base = OTHER; note = 2'-deoxy nucleotide
  modified_base 20..21: mod_base = OTHER; note = 2'-deoxy nucleotide
  modified_base 3: mod_base = OTHER; note = 2'-OMe modified nucleotide
  modified_base 5: mod_base = OTHER; note = 2'-OMe modified nucleotide
  modified_base 7: mod_base = OTHER; note = 2'-OMe modified nucleotide
  modified_base 9: mod_base = OTHER; note = 2'-OMe modified nucleotide
  modified_base 11: mod_base = OTHER; note = 2'-OMe modified nucleotide
  modified_base 13: mod_base = OTHER; note = 2'-OMe modified nucleotide
  modified_base 15: mod_base = OTHER; note = 2'-OMe modified nucleotide
  modified_base 17: mod_base = OTHER; note = 2'-OMe modified nucleotide
  modified_base 19: mod_base = OTHER; note = 2'-OMe modified nucleotide
  modified_base 2: mod_base = OTHER; note = 2-deoxy-2-fluoro ribonucleotide
  modified_base 4: mod_base = OTHER; note = 2-deoxy-2-fluoro ribonucleotide
  modified_base 6: mod_base = OTHER; note = 2-deoxy-2-fluoro ribonucleotide
  modified_base 8: mod_base = OTHER; note = 2-deoxy-2-fluoro ribonucleotide
  modified_base 10: mod_base = OTHER; note = 2-deoxy-2-fluoro ribonucleotide
  modified_base 12: mod_base = OTHER; note = 2-deoxy-2-fluoro ribonucleotide
  modified_base 14: mod_base = OTHER; note = 2-deoxy-2-fluoro ribonucleotide
  modified_base 16: mod_base = OTHER; note = 2-deoxy-2-fluoro ribonucleotide
  modified_base 18: mod_base = OTHER; note = 2-deoxy-2-fluoro ribonucleotide
  modified_base 20..21: mod_base = OTHER; note = phosphorothioate internucleotide linkage
  modified_base 1: mod_base = OTHER; note = Thymine
  modified_base 20..21: mod_base = OTHER; note = Thymine
tggtccgactatgctggtgtt

SEQ ID NO: 413 - RNA, 21 nt, synthetic construct
  source 1..21: mol_type = other RNA
  modified_base 1: mod_base = OTHER; note = 2'-deoxy nucleotide
  modified_base 20..21: mod_base = OTHER; note = 2'-deoxy nucleotide
  modified_base 3: mod_base = OTHER; note = 2'-OMe modified nucleotide
  modified_base 5: mod_base = OTHER; note = 2'-OMe modified nucleotide
  modified_base 7: mod_base = OTHER; note = 2'-OMe modified nucleotide
  modified_base 9: mod_base = OTHER; note = 2'-OMe modified nucleotide
  modified_base 11: mod_base = OTHER; note = 2'-OMe modified nucleotide
  modified_base 13: mod_base = OTHER; note = 2'-OMe modified nucleotide
  modified_base 15: mod_base = OTHER; note = 2'-OMe modified nucleotide
  modified_base 17: mod_base = OTHER; note = 2'-OMe modified nucleotide
  modified_base 19: mod_base = OTHER; note = 2'-OMe modified nucleotide
  modified_base 2: mod_base = OTHER; note = 2-deoxy-2-fluoro ribonucleotide
  modified_base 4: mod_base = OTHER; note = 2-deoxy-2-fluoro ribonucleotide
  modified_base 6: mod_base = OTHER; note = 2-deoxy-2-fluoro ribonucleotide
  modified_base 8: mod_base = OTHER; note = 2-deoxy-2-fluoro ribonucleotide
  modified_base 10: mod_base = OTHER; note = 2-deoxy-2-fluoro ribonucleotide
  modified_base 12: mod_base = OTHER; note = 2-deoxy-2-fluoro ribonucleotide
  modified_base 14: mod_base = OTHER; note = 2-deoxy-2-fluoro ribonucleotide
  modified_base 16: mod_base = OTHER; note = 2-deoxy-2-fluoro ribonucleotide
  modified_base 18: mod_base = OTHER; note = 2-deoxy-2-fluoro ribonucleotide
  modified_base 20..21: mod_base = OTHER; note = phosphorothioate internucleotide linkage
  modified_base 1: mod_base = OTHER; note = Thymine
  modified_base 20..21: mod_base = OTHER; note = Thymine
ttttctggggtccgactattt

SEQ ID NO: 414 - RNA, 21 nt, synthetic construct
  source 1..21: mol_type = other RNA
  modified_base 1: mod_base = OTHER; note = 2'-deoxy nucleotide
  modified_base 20..21: mod_base = OTHER; note = 2'-deoxy nucleotide
  modified_base 3: mod_base = OTHER; note = 2'-OMe modified nucleotide
  modified_base 5: mod_base = OTHER; note = 2'-OMe modified nucleotide
  modified_base 7: mod_base = OTHER; note = 2'-OMe modified nucleotide
  modified_base 9: mod_base = OTHER; note = 2'-OMe modified nucleotide
  modified_base 11: mod_base = OTHER; note = 2'-OMe modified nucleotide
  modified_base 13: mod_base = OTHER; note = 2'-OMe modified nucleotide
  modified_base 15: mod_base = OTHER; note = 2'-OMe modified nucleotide
  modified_base 17: mod_base = OTHER; note = 2'-OMe modified nucleotide
  modified_base 19: mod_base = OTHER; note = 2'-OMe modified nucleotide
  modified_base 2: mod_base = OTHER; note = 2-deoxy-2-fluoro ribonucleotide
  modified_base 4: mod_base = OTHER; note = 2-deoxy-2-fluoro ribonucleotide
  modified_base 6: mod_base = OTHER; note = 2-deoxy-2-fluoro ribonucleotide
  modified_base 8: mod_base = OTHER; note = 2-deoxy-2-fluoro ribonucleotide
  modified_base 10: mod_base = OTHER; note = 2-deoxy-2-fluoro ribonucleotide
  modified_base 12: mod_base = OTHER; note = 2-deoxy-2-fluoro ribonucleotide
  modified_base 14: mod_base = OTHER; note = 2-deoxy-2-fluoro ribonucleotide
  modified_base 16: mod_base = OTHER; note = 2-deoxy-2-fluoro ribonucleotide
  modified_base 18: mod_base = OTHER; note = 2-deoxy-2-fluoro ribonucleotide
  modified_base 20..21: mod_base = OTHER; note = phosphorothioate internucleotide linkage
  modified_base 1: mod_base = OTHER; note = Thymine
  modified_base 20..21: mod_base = OTHER; note = Thymine
tttttctggggtccgactatt

SEQ ID NO: 415 - RNA, 21 nt, synthetic construct
  source 1..21: mol_type = other RNA
  modified_base 1: mod_base = OTHER; note = 2'-deoxy nucleotide
  modified_base 20..21: mod_base = OTHER; note = 2'-deoxy nucleotide
  modified_base 3: mod_base = OTHER; note = 2'-OMe modified nucleotide
  modified_base 5: mod_base = OTHER; note = 2'-OMe modified nucleotide
  modified_base 7: mod_base = OTHER; note = 2'-OMe modified nucleotide
  modified_base 9: mod_base = OTHER; note = 2'-OMe modified nucleotide
  modified_base 11: mod_base = OTHER; note = 2'-OMe modified nucleotide
  modified_base 13: mod_base = OTHER; note = 2'-OMe modified nucleotide
  modified_base 15: mod_base = OTHER; note = 2'-OMe modified nucleotide
  modified_base 17: mod_base = OTHER; note = 2'-OMe modified nucleotide
  modified_base 19: mod_base = OTHER; note = 2'-OMe modified nucleotide
  modified_base 2: mod_base = OTHER; note = 2-deoxy-2-fluoro ribonucleotide
  modified_base 4: mod_base = OTHER; note = 2-deoxy-2-fluoro ribonucleotide
  modified_base 6: mod_base = OTHER; note = 2-deoxy-2-fluoro ribonucleotide
  modified_base 8: mod_base = OTHER; note = 2-deoxy-2-fluoro ribonucleotide
  modified_base 10: mod_base = OTHER; note = 2-deoxy-2-fluoro ribonucleotide
  modified_base 12: mod_base = OTHER; note = 2-deoxy-2-fluoro ribonucleotide
  modified_base 14: mod_base = OTHER; note = 2-deoxy-2-fluoro ribonucleotide
  modified_base 16: mod_base = OTHER; note = 2-deoxy-2-fluoro ribonucleotide
  modified_base 18: mod_base = OTHER; note = 2-deoxy-2-fluoro ribonucleotide
  modified_base 20..21: mod_base = OTHER; note = phosphorothioate internucleotide linkage
  modified_base 1: mod_base = OTHER; note = Thymine
  modified_base 20..21: mod_base = OTHER; note = Thymine
tgcgaatctcagcatctggtt

SEQ ID NO: 416 - RNA, 21 nt, synthetic construct
  source 1..21: mol_type = other RNA
  modified_base 1: mod_base = OTHER; note = 2'-deoxy nucleotide
  modified_base 20..21: mod_base = OTHER; note = 2'-deoxy nucleotide
  modified_base 3: mod_base = OTHER; note = 2'-OMe modified nucleotide
  modified_base 5: mod_base = OTHER; note = 2'-OMe modified nucleotide
  modified_base 7: mod_base = OTHER; note = 2'-OMe modified nucleotide
  modified_base 9: mod_base = OTHER; note = 2'-OMe modified nucleotide
  modified_base 11: mod_base = OTHER; note = 2'-OMe modified nucleotide
  modified_base 13: mod_base = OTHER; note = 2'-OMe modified nucleotide
  modified_base 15: mod_base = OTHER; note = 2'-OMe modified nucleotide
  modified_base 17: mod_base = OTHER; note = 2'-OMe modified nucleotide
  modified_base 19: mod_base = OTHER; note = 2'-OMe modified nucleotide
  modified_base 2: mod_base = OTHER; note = 2-deoxy-2-fluoro ribonucleotide
  modified_base 4: mod_base = OTHER; note = 2-deoxy-2-fluoro ribonucleotide
  modified_base 6: mod_base = OTHER; note = 2-deoxy-2-fluoro ribonucleotide
  modified_base 8: mod_base = OTHER; note = 2-deoxy-2-fluoro ribonucleotide
  modified_base 10: mod_base = OTHER; note = 2-deoxy-2-fluoro ribonucleotide
  modified_base 12: mod_base = OTHER; note = 2-deoxy-2-fluoro ribonucleotide
  modified_base 14: mod_base = OTHER; note = 2-deoxy-2-fluoro ribonucleotide
  modified_base 16: mod_base = OTHER; note = 2-deoxy-2-fluoro ribonucleotide
  modified_base 18: mod_base = OTHER; note = 2-deoxy-2-fluoro ribonucleotide
  modified_base 20..21: mod_base = OTHER; note = phosphorothioate internucleotide linkage
  modified_base 1: mod_base = OTHER; note = Thymine
  modified_base 20..21: mod_base = OTHER; note = Thymine
tccaagggcgaatctcagctt

SEQ ID NO: 417 - RNA, 21 nt, synthetic construct
  source 1..21: mol_type = other RNA
  modified_base 1: mod_base = OTHER; note = 2'-deoxy nucleotide
  modified_base 20..21: mod_base = OTHER; note = 2'-deoxy nucleotide
  modified_base 3: mod_base = OTHER; note = 2'-OMe modified nucleotide
  modified_base 5: mod_base = OTHER; note = 2'-OMe modified nucleotide
  modified_base 7: mod_base = OTHER; note = 2'-OMe modified nucleotide
  modified_base 9: mod_base = OTHER; note = 2'-OMe modified nucleotide
  modified_base 11: mod_base = OTHER; note = 2'-OMe modified nucleotide
  modified_base 13: mod_base = OTHER; note = 2'-OMe modified nucleotide
  modified_base 15: mod_base = OTHER; note = 2'-OMe modified nucleotide
  modified_base 17: mod_base = OTHER; note = 2'-OMe modified nucleotide
  modified_base 19: mod_base = OTHER; note = 2'-OMe modified nucleotide
  modified_base 2: mod_base = OTHER; note = 2-deoxy-2-fluoro ribonucleotide
  modified_base 4: mod_base = OTHER; note = 2-deoxy-2-fluoro ribonucleotide
  modified_base 6: mod_base = OTHER; note = 2-deoxy-2-fluoro ribonucleotide
  modified_base 8: mod_base = OTHER; note = 2-deoxy-2-fluoro ribonucleotide
  modified_base 10: mod_base = OTHER; note = 2-deoxy-2-fluoro ribonucleotide
  modified_base 12: mod_base = OTHER; note = 2-deoxy-2-fluoro ribonucleotide
  modified_base 14: mod_base = OTHER; note = 2-deoxy-2-fluoro ribonucleotide
  modified_base 16: mod_base = OTHER; note = 2-deoxy-2-fluoro ribonucleotide
  modified_base 18: mod_base = OTHER; note = 2-deoxy-2-fluoro ribonucleotide
  modified_base 20..21: mod_base = OTHER; note = phosphorothioate internucleotide linkage
  modified_base 1: mod_base = OTHER; note = Thymine
  modified_base 20..21: mod_base = OTHER; note = Thymine
taccaagggcgaatctcagtt

SEQ ID NO: 418 - RNA, 21 nt, synthetic construct
  source 1..21: mol_type = other RNA
  modified_base 1: mod_base = OTHER; note = 2'-deoxy nucleotide
  modified_base 20..21: mod_base = OTHER; note = 2'-deoxy nucleotide
  modified_base 3: mod_base = OTHER; note = 2'-OMe modified nucleotide
  modified_base 5: mod_base = OTHER; note = 2'-OMe modified nucleotide
  modified_base 7: mod_base = OTHER; note = 2'-OMe modified nucleotide
  modified_base 9: mod_base = OTHER; note = 2'-OMe modified nucleotide
  modified_base 11: mod_base = OTHER; note = 2'-OMe modified nucleotide
  modified_base 13: mod_base = OTHER; note = 2'-OMe modified nucleotide
  modified_base 15: mod_base = OTHER; note = 2'-OMe modified nucleotide
  modified_base 17: mod_base = OTHER; note = 2'-OMe modified nucleotide
  modified_base 19: mod_base = OTHER; note = 2'-OMe modified nucleotide
  modified_base 2: mod_base = OTHER; note = 2-deoxy-2-fluoro ribonucleotide
  modified_base 4: mod_base = OTHER; note = 2-deoxy-2-fluoro ribonucleotide
  modified_base 6: mod_base = OTHER; note = 2-deoxy-2-fluoro ribonucleotide
  modified_base 8: mod_base = OTHER; note = 2-deoxy-2-fluoro ribonucleotide
  modified_base 10: mod_base = OTHER; note = 2-deoxy-2-fluoro ribonucleotide
  modified_base 12: mod_base = OTHER; note = 2-deoxy-2-fluoro ribonucleotide
  modified_base 14: mod_base = OTHER; note = 2-deoxy-2-fluoro ribonucleotide
  modified_base 16: mod_base = OTHER; note = 2-deoxy-2-fluoro ribonucleotide
  modified_base 18: mod_base = OTHER; note = 2-deoxy-2-fluoro ribonucleotide
  modified_base 20..21: mod_base = OTHER; note = phosphorothioate internucleotide linkage
  modified_base 1: mod_base = OTHER; note = Thymine
  modified_base 20..21: mod_base = OTHER; note = Thymine
tcaccaagggcgaatctcatt

SEQ ID NO: 419 - RNA, 21 nt, synthetic construct
  source 1..21: mol_type = other RNA
  modified_base 1: mod_base = OTHER; note = 2'-deoxy nucleotide
  modified_base 20..21: mod_base = OTHER; note = 2'-deoxy nucleotide
  modified_base 3: mod_base = OTHER; note = 2'-OMe modified nucleotide
  modified_base 5: mod_base = OTHER; note = 2'-OMe modified nucleotide
  modified_base 7: mod_base = OTHER; note = 2'-OMe modified nucleotide
  modified_base 9: mod_base = OTHER; note = 2'-OMe modified nucleotide
  modified_base 11: mod_base = OTHER; note = 2'-OMe modified nucleotide
  modified_base 13: mod_base = OTHER; note = 2'-OMe modified nucleotide
  modified_base 15: mod_base = OTHER; note = 2'-OMe modified nucleotide
  modified_base 17: mod_base = OTHER; note = 2'-OMe modified nucleotide
  modified_base 19: mod_base = OTHER; note = 2'-OMe modified nucleotide
  modified_base 2: mod_base = OTHER; note = 2-deoxy-2-fluoro ribonucleotide
  modified_base 4: mod_base = OTHER; note = 2-deoxy-2-fluoro ribonucleotide
  modified_base 6: mod_base = OTHER; note = 2-deoxy-2-fluoro ribonucleotide
  modified_base 8: mod_base = OTHER; note = 2-deoxy-2-fluoro ribonucleotide
  modified_base 10: mod_base = OTHER; note = 2-deoxy-2-fluoro ribonucleotide
  modified_base 12: mod_base = OTHER; note = 2-deoxy-2-fluoro ribonucleotide
  modified_base 14: mod_base = OTHER; note = 2-deoxy-2-fluoro ribonucleotide
  modified_base 16: mod_base = OTHER; note = 2-deoxy-2-fluoro ribonucleotide
  modified_base 18: mod_base = OTHER; note = 2-deoxy-2-fluoro ribonucleotide
  modified_base 20..21: mod_base = OTHER; note = phosphorothioate internucleotide linkage
  modified_base 1: mod_base = OTHER; note = Thymine
  modified_base 20..21: mod_base = OTHER; note = Thymine
tacaccaagggcgaatctctt

SEQ ID NO: 420 - RNA, 21 nt, synthetic construct
  source 1..21: mol_type = other RNA
  modified_base 1: mod_base = OTHER; note = 2'-deoxy nucleotide
  modified_base 20..21: mod_base = OTHER; note = 2'-deoxy nucleotide
  modified_base 3: mod_base = OTHER; note = 2'-OMe modified nucleotide
  modified_base 5: mod_base = OTHER; note = 2'-OMe modified nucleotide
  modified_base 7: mod_base = OTHER; note = 2'-OMe modified nucleotide
  modified_base 9: mod_base = OTHER; note = 2'-OMe modified nucleotide
  modified_base 11: mod_base = OTHER; note = 2'-OMe modified nucleotide
  modified_base 13: mod_base = OTHER; note = 2'-OMe modified nucleotide
  modified_base 15: mod_base = OTHER; note = 2'-OMe modified nucleotide
  modified_base 17: mod_base = OTHER; note = 2'-OMe modified nucleotide
  modified_base 19: mod_base = OTHER; note = 2'-OMe modified nucleotide
  modified_base 2: mod_base = OTHER; note = 2-deoxy-2-fluoro ribonucleotide
  modified_base 4: mod_base = OTHER; note = 2-deoxy-2-fluoro ribonucleotide
  modified_base 6: mod_base = OTHER; note = 2-deoxy-2-fluoro ribonucleotide
  modified_base 8: mod_base = OTHER; note = 2-deoxy-2-fluoro ribonucleotide
  modified_base 10: mod_base = OTHER; note = 2-deoxy-2-fluoro ribonucleotide
  modified_base 12: mod_base = OTHER; note = 2-deoxy-2-fluoro ribonucleotide
  modified_base 14: mod_base = OTHER; note = 2-deoxy-2-fluoro ribonucleotide
  modified_base 16: mod_base = OTHER; note = 2-deoxy-2-fluoro ribonucleotide
  modified_base 18: mod_base = OTHER; note = 2-deoxy-2-fluoro ribonucleotide
  modified_base 20..21: mod_base = OTHER; note = phosphorothioate internucleotide linkage
  modified_base 1: mod_base = OTHER; note = Thymine
  modified_base 20..21: mod_base = OTHER; note = Thymine
tcctgacactgggatccattt

SEQ ID NO: 421 - RNA, 21 nt, synthetic construct
  source 1..21: mol_type = other RNA
  modified_base 1: mod_base = OTHER; note = 2'-deoxy nucleotide
  modified_base 20..21: mod_base = OTHER; note = 2'-deoxy nucleotide
  modified_base 3: mod_base = OTHER; note = 2'-OMe modified nucleotide
  modified_base 5: mod_base = OTHER; note = 2'-OMe modified nucleotide
  modified_base 7: mod_base = OTHER; note = 2'-OMe modified nucleotide
  modified_base 9: mod_base = OTHER; note = 2'-OMe modified nucleotide
  modified_base 11: mod_base = OTHER; note = 2'-OMe modified nucleotide
  modified_base 13: mod_base = OTHER; note = 2'-OMe modified nucleotide
  modified_base 15: mod_base = OTHER; note = 2'-OMe modified nucleotide
  modified_base 17: mod_base = OTHER; note = 2'-OMe modified nucleotide
  modified_base 19: mod_base = OTHER; note = 2'-OMe modified nucleotide
  modified_base 2: mod_base = OTHER; note = 2-deoxy-2-fluoro ribonucleotide
  modified_base 4: mod_base = OTHER; note = 2-deoxy-2-fluoro ribonucleotide
  modified_base 6: mod_base = OTHER; note = 2-deoxy-2-fluoro ribonucleotide
  modified_base 8: mod_base = OTHER; note = 2-deoxy-2-fluoro ribonucleotide
  modified_base 10: mod_base = OTHER; note = 2-deoxy-2-fluoro ribonucleotide
  modified_base 12: mod_base = OTHER; note = 2-deoxy-2-fluoro ribonucleotide
  modified_base 14: mod_base = OTHER; note = 2-deoxy-2-fluoro ribonucleotide
  modified_base 16: mod_base = OTHER; note = 2-deoxy-2-fluoro ribonucleotide
  modified_base 18: mod_base = OTHER; note = 2-deoxy-2-fluoro ribonucleotide
  modified_base 20..21: mod_base = OTHER; note = phosphorothioate internucleotide linkage
  modified_base 1: mod_base = OTHER; note = Thymine
  modified_base 20..21: mod_base = OTHER; note = Thymine
ttgcaaggacacttgattctt

SEQ ID NO: 422 - RNA, 21 nt, synthetic construct
  source 1..21: mol_type = other RNA
  modified_base 1: mod_base = OTHER; note = 2'-deoxy nucleotide
  modified_base 20..21: mod_base = OTHER; note = 2'-deoxy nucleotide
  modified_base 3: mod_base = OTHER; note = 2'-OMe modified nucleotide
  modified_base 5: mod_base = OTHER; note = 2'-OMe modified nucleotide
  modified_base 7: mod_base = OTHER; note = 2'-OMe modified nucleotide
  modified_base 9: mod_base = OTHER; note = 2'-OMe modified nucleotide
  modified_base 11: mod_base = OTHER; note = 2'-OMe modified nucleotide
  modified_base 13: mod_base = OTHER; note = 2'-OMe modified nucleotide
  modified_base 15: mod_base = OTHER; note = 2'-OMe modified nucleotide
  modified_base 17: mod_base = OTHER; note = 2'-OMe modified nucleotide
  modified_base 19: mod_base = OTHER; note = 2'-OMe modified nucleotide
  modified_base 2: mod_base = OTHER; note = 2-deoxy-2-fluoro ribonucleotide
  modified_base 4: mod_base = OTHER; note = 2-deoxy-2-fluoro ribonucleotide
  modified_base 6: mod_base = OTHER; note = 2-deoxy-2-fluoro ribonucleotide
  modified_base 8: mod_base = OTHER; note = 2-deoxy-2-fluoro ribonucleotide
  modified_base 10: mod_base = OTHER; note = 2-deoxy-2-fluoro ribonucleotide
  modified_base 12: mod_base = OTHER; note = 2-deoxy-2-fluoro ribonucleotide
  modified_base 14: mod_base = OTHER; note = 2-deoxy-2-fluoro ribonucleotide
  modified_base 16: mod_base = OTHER; note = 2-deoxy-2-fluoro ribonucleotide
  modified_base 18: mod_base = OTHER; note = 2-deoxy-2-fluoro ribonucleotide
  modified_base 20..21: mod_base = OTHER; note = phosphorothioate internucleotide linkage
  modified_base 1: mod_base = OTHER; note = Thymine
  modified_base 20..21: mod_base = OTHER; note = Thymine
tttgcaaggacacttgatttt

SEQ ID NO: 423 - RNA, 21 nt, synthetic construct
  source 1..21: mol_type = other RNA
  modified_base 1: mod_base = OTHER; note = 2'-deoxy nucleotide
  modified_base 20..21: mod_base = OTHER; note = 2'-deoxy nucleotide
  modified_base 3: mod_base = OTHER; note = 2'-OMe modified nucleotide
  modified_base 5: mod_base = OTHER; note = 2'-OMe modified nucleotide
  modified_base 7: mod_base = OTHER; note = 2'-OMe modified nucleotide
  modified_base 9: mod_base = OTHER; note = 2'-OMe modified nucleotide
  modified_base 11: mod_base = OTHER; note = 2'-OMe modified nucleotide
  modified_base 13: mod_base = OTHER; note = 2'-OMe modified nucleotide
  modified_base 15: mod_base = OTHER; note = 2'-OMe modified nucleotide
  modified_base 17: mod_base = OTHER; note = 2'-OMe modified nucleotide
  modified_base 19: mod_base = OTHER; note = 2'-OMe modified nucleotide
  modified_base 2: mod_base = OTHER; note = 2-deoxy-2-fluoro ribonucleotide
  modified_base 4: mod_base = OTHER; note = 2-deoxy-2-fluoro ribonucleotide
  modified_base 6: mod_base = OTHER; note = 2-deoxy-2-fluoro ribonucleotide
  modified_base 8: mod_base = OTHER; note = 2-deoxy-2-fluoro ribonucleotide
  modified_base 10: mod_base = OTHER; note = 2-deoxy-2-fluoro ribonucleotide
  modified_base 12: mod_base = OTHER; note = 2-deoxy-2-fluoro ribonucleotide
  modified_base 14: mod_base = OTHER; note = 2-deoxy-2-fluoro ribonucleotide
  modified_base 16: mod_base = OTHER; note = 2-deoxy-2-fluoro ribonucleotide
  modified_base 18: mod_base = OTHER; note = 2-deoxy-2-fluoro ribonucleotide
  modified_base 20..21: mod_base = OTHER; note = phosphorothioate internucleotide linkage
  modified_base 1: mod_base = OTHER; note = Thymine
  modified_base 20..21: mod_base = OTHER; note = Thymine
tttgctccgttggtgcttctt

SEQ ID NO: 424 - RNA, 21 nt, synthetic construct
  source 1..21: mol_type = other RNA
  modified_base 1: mod_base = OTHER; note = 2'-deoxy nucleotide
  modified_base 20..21: mod_base = OTHER; note = 2'-deoxy nucleotide
  modified_base 3: mod_base = OTHER; note = 2'-OMe modified nucleotide
  modified_base 5: mod_base = OTHER; note = 2'-OMe modified nucleotide
  modified_base 7: mod_base = OTHER; note = 2'-OMe modified nucleotide
  modified_base 9: mod_base = OTHER; note = 2'-OMe modified nucleotide
  modified_base 11: mod_base = OTHER; note = 2'-OMe modified nucleotide
  modified_base 13: mod_base = OTHER; note = 2'-OMe modified nucleotide
  modified_base 15: mod_base = OTHER; note = 2'-OMe modified nucleotide
  modified_base 17: mod_base = OTHER; note = 2'-OMe modified nucleotide
  modified_base 19: mod_base = OTHER; note = 2'-OMe modified nucleotide
  modified_base 2: mod_base = OTHER; note = 2-deoxy-2-fluoro ribonucleotide
  modified_base 4: mod_base = OTHER; note = 2-deoxy-2-fluoro ribonucleotide
  modified_base 6: mod_base = OTHER; note = 2-deoxy-2-fluoro ribonucleotide
  modified_base 8: mod_base = OTHER; note = 2-deoxy-2-fluoro ribonucleotide
  modified_base 10: mod_base = OTHER; note = 2-deoxy-2-fluoro ribonucleotide
  modified_base 12: mod_base = OTHER; note = 2-deoxy-2-fluoro ribonucleotide
  modified_base 14: mod_base = OTHER; note = 2-deoxy-2-fluoro ribonucleotide
  modified_base 16: mod_base = OTHER; note = 2-deoxy-2-fluoro ribonucleotide
  modified_base 18: mod_base = OTHER; note = 2-deoxy-2-fluoro ribonucleotide
  modified_base 20..21: mod_base = OTHER; note = phosphorothioate internucleotide linkage
  modified_base 1: mod_base = OTHER; note = Thymine
  modified_base 20..21: mod_base = OTHER; note = Thymine
taatgagcctcgataactctt

SEQ ID NO: 425 - RNA, 21 nt, synthetic construct
  source 1..21: mol_type = other RNA
  modified_base 1: mod_base = OTHER; note = 2'-deoxy nucleotide
  modified_base 20..21: mod_base = OTHER; note = 2'-deoxy nucleotide
  modified_base 3: mod_base = OTHER; note = 2'-OMe modified nucleotide
  modified_base 5: mod_base = OTHER; note = 2'-OMe modified nucleotide
  modified_base 7: mod_base = OTHER; note = 2'-OMe modified nucleotide
  modified_base 9: mod_base = OTHER; note = 2'-OMe modified nucleotide
  modified_base 11: mod_base = OTHER; note = 2'-OMe modified nucleotide
  modified_base 13: mod_base = OTHER; note = 2'-OMe modified nucleotide
  modified_base 15: mod_base = OTHER; note = 2'-OMe modified nucleotide
  modified_base 17: mod_base = OTHER; note = 2'-OMe modified nucleotide
  modified_base 19: mod_base = OTHER; note = 2'-OMe modified nucleotide
  modified_base 2: mod_base = OTHER; note = 2-deoxy-2-fluoro ribonucleotide
  modified_base 4: mod_base = OTHER; note = 2-deoxy-2-fluoro ribonucleotide
  modified_base 6: mod_base = OTHER; note = 2-deoxy-2-fluoro ribonucleotide
  modified_base 8: mod_base = OTHER; note = 2-deoxy-2-fluoro ribonucleotide
  modified_base 10: mod_base = OTHER; note = 2-deoxy-2-fluoro ribonucleotide
  modified_base 12: mod_base = OTHER; note = 2-deoxy-2-fluoro ribonucleotide
  modified_base 14: mod_base = OTHER; note = 2-deoxy-2-fluoro ribonucleotide
  modified_base 16: mod_base = OTHER; note = 2-deoxy-2-fluoro ribonucleotide
  modified_base 18: mod_base = OTHER; note = 2-deoxy-2-fluoro ribonucleotide
  modified_base 20..21: mod_base = OTHER; note = phosphorothioate internucleotide linkage
  modified_base 1: mod_base = OTHER; note = Thymine
  modified_base 20..21: mod_base = OTHER; note = Thymine
tgaatgagcctcgataacttt

SEQ ID NO: 426 - RNA, 21 nt, synthetic construct
  source 1..21: mol_type = other RNA
  modified_base 1: mod_base = OTHER; note = 2'-deoxy nucleotide
  modified_base 20..21: mod_base = OTHER; note = 2'-deoxy nucleotide
  modified_base 3: mod_base = OTHER; note = 2'-OMe modified nucleotide
  modified_base 5: mod_base = OTHER; note = 2'-OMe modified nucleotide
  modified_base 7: mod_base = OTHER; note = 2'-OMe modified nucleotide
  modified_base 9: mod_base = OTHER; note = 2'-OMe modified nucleotide
  modified_base 11: mod_base = OTHER; note = 2'-OMe modified nucleotide
  modified_base 13: mod_base = OTHER; note = 2'-OMe modified nucleotide
  modified_base 15: mod_base = OTHER; note = 2'-OMe modified nucleotide
  modified_base 17: mod_base = OTHER; note = 2'-OMe modified nucleotide
  modified_base 19: mod_base = OTHER; note = 2'-OMe modified nucleotide
  modified_base 2: mod_base = OTHER; note = 2-deoxy-2-fluoro ribonucleotide
  modified_base 4: mod_base = OTHER; note = 2-deoxy-2-fluoro ribonucleotide
  modified_base 6: mod_base = OTHER; note = 2-deoxy-2-fluoro ribonucleotide
  modified_base 8: mod_base = OTHER; note = 2-deoxy-2-fluoro ribonucleotide
  modified_base 10: mod_base = OTHER; note = 2-deoxy-2-fluoro ribonucleotide
  modified_base 12: mod_base = OTHER; note = 2-deoxy-2-fluoro ribonucleotide
  modified_base 14: mod_base = OTHER; note = 2-deoxy-2-fluoro ribonucleotide
  modified_base 16: mod_base = OTHER; note = 2-deoxy-2-fluoro ribonucleotide
  modified_base 18: mod_base = OTHER; note = 2-deoxy-2-fluoro ribonucleotide
  modified_base 20..21: mod_base = OTHER; note = phosphorothioate internucleotide linkage
  modified_base 1: mod_base = OTHER; note = Thymine
  modified_base 20..21: mod_base = OTHER; note = Thymine
tggataatattctgttgtctt

SEQ ID NO: 427 - RNA, 21 nt, synthetic construct
  source 1..21: mol_type = other RNA
  modified_base 1: mod_base = OTHER; note = 2'-deoxy nucleotide
  modified_base 20..21: mod_base = OTHER; note = 2'-deoxy nucleotide
  modified_base 3: mod_base = OTHER; note = 2'-OMe modified nucleotide
  modified_base 5: mod_base = OTHER; note = 2'-OMe modified nucleotide
  modified_base 7: mod_base = OTHER; note = 2'-OMe modified nucleotide
  modified_base 9: mod_base = OTHER; note = 2'-OMe modified nucleotide
  modified_base 11: mod_base = OTHER; note = 2'-OMe modified nucleotide
  modified_base 13: mod_base = OTHER; note = 2'-OMe modified nucleotide
  modified_base 15: mod_base = OTHER; note = 2'-OMe modified nucleotide
  modified_base 17: mod_base = OTHER; note = 2'-OMe modified nucleotide
  modified_base 19: mod_base = OTHER; note = 2'-OMe modified nucleotide
  modified_base 2: mod_base = OTHER; note = 2-deoxy-2-fluoro ribonucleotide
  modified_base 4: mod_base = OTHER; note = 2-deoxy-2-fluoro ribonucleotide
  modified_base 6: mod_base = OTHER; note = 2-deoxy-2-fluoro ribonucleotide
  modified_base 8: mod_base = OTHER; note = 2-deoxy-2-fluoro ribonucleotide
  modified_base 10: mod_base = OTHER; note = 2-deoxy-2-fluoro ribonucleotide
  modified_base 12: mod_base = OTHER; note = 2-deoxy-2-fluoro ribonucleotide
  modified_base 14: mod_base = OTHER; note = 2-deoxy-2-fluoro ribonucleotide
  modified_base 16: mod_base = OTHER; note = 2-deoxy-2-fluoro ribonucleotide
  modified_base 18: mod_base = OTHER; note = 2-deoxy-2-fluoro ribonucleotide
  modified_base 20..21: mod_base = OTHER; note = phosphorothioate internucleotide linkage
  modified_base 1: mod_base = OTHER; note = Thymine
  modified_base 20..21: mod_base = OTHER; note = Thymine
tccatggtataacaccaagtt

SEQ ID NO: 428 - RNA, 21 nt, synthetic construct
  source 1..21: mol_type = other RNA
  modified_base 1: mod_base = OTHER; note = 2'-deoxy nucleotide
  modified_base 20..21: mod_base = OTHER; note = 2'-deoxy nucleotide
  modified_base 3: mod_base = OTHER; note = 2'-OMe modified nucleotide
  modified_base 5: mod_base = OTHER; note = 2'-OMe modified nucleotide
  modified_base 7: mod_base = OTHER; note = 2'-OMe modified nucleotide
  modified_base 9: mod_base = OTHER; note = 2'-OMe modified nucleotide
  modified_base 11: mod_base = OTHER; note = 2'-OMe modified nucleotide
  modified_base 13: mod_base = OTHER; note = 2'-OMe modified nucleotide
  modified_base 15: mod_base = OTHER; note = 2'-OMe modified nucleotide
  modified_base 17: mod_base = OTHER; note = 2'-OMe modified nucleotide
  modified_base 19: mod_base = OTHER; note = 2'-OMe modified nucleotide
  modified_base 2: mod_base = OTHER; note = 2-deoxy-2-fluoro ribonucleotide
  modified_base 4: mod_base = OTHER; note = 2-deoxy-2-fluoro ribonucleotide
  modified_base 6: mod_base = OTHER; note = 2-deoxy-2-fluoro ribonucleotide
  modified_base 8: mod_base = OTHER; note = 2-deoxy-2-fluoro ribonucleotide
  modified_base 10: mod_base = OTHER; note = 2-deoxy-2-fluoro ribonucleotide
  modified_base 12: mod_base = OTHER; note = 2-deoxy-2-fluoro ribonucleotide
  modified_base 14: mod_base = OTHER; note = 2-deoxy-2-fluoro ribonucleotide
  modified_base 16: mod_base = OTHER; note = 2-deoxy-2-fluoro ribonucleotide
  modified_base 18: mod_base = OTHER; note = 2-deoxy-2-fluoro ribonucleotide
  modified_base 20..21: mod_base = OTHER; note = phosphorothioate internucleotide linkage
  modified_base 1: mod_base = OTHER; note = Thymine
  modified_base 20..21: mod_base = OTHER; note = Thymine
tgatccatggtataacacctt

SEQ ID NO: 429 - RNA, 21 nt, synthetic construct
  source 1..21: mol_type = other RNA
  modified_base 1: mod_base = OTHER; note = 2'-deoxy nucleotide
  modified_base 20..21: mod_base = OTHER; note = 2'-deoxy nucleotide
  modified_base 3: mod_base = OTHER; note = 2'-OMe modified nucleotide
  modified_base 5: mod_base = OTHER; note = 2'-OMe modified nucleotide
  modified_base 7: mod_base = OTHER; note = 2'-OMe modified nucleotide
  modified_base 9: mod_base = OTHER; note = 2'-OMe modified nucleotide
  modified_base 11: mod_base = OTHER; note = 2'-OMe modified nucleotide
  modified_base 13: mod_base = OTHER; note = 2'-OMe modified nucleotide
  modified_base 15: mod_base = OTHER; note = 2'-OMe modified nucleotide
  modified_base 17: mod_base = OTHER; note = 2'-OMe modified nucleotide
  modified_base 19: mod_base = OTHER; note = 2'-OMe modified nucleotide
  modified_base 2: mod_base = OTHER; note = 2-deoxy-2-fluoro ribonucleotide
  modified_base 4: mod_base = OTHER; note = 2-deoxy-2-fluoro ribonucleotide
  modified_base 6: mod_base = OTHER; note = 2-deoxy-2-fluoro ribonucleotide
  modified_base 8: mod_base = OTHER; note = 2-deoxy-2-fluoro ribonucleotide
  modified_base 10: mod_base = OTHER; note = 2-deoxy-2-fluoro ribonucleotide
  modified_base 12: mod_base = OTHER; note = 2-deoxy-2-fluoro ribonucleotide
  modified_base 14: mod_base = OTHER; note = 2-deoxy-2-fluoro ribonucleotide
  modified_base 16: mod_base = OTHER; note = 2-deoxy-2-fluoro ribonucleotide
  modified_base 18: mod_base = OTHER; note = 2-deoxy-2-fluoro ribonucleotide
  modified_base 20..21: mod_base = OTHER; note = phosphorothioate internucleotide linkage
  modified_base 1: mod_base = OTHER; note = Thymine
  modified_base 20..21: mod_base = OTHER; note = Thymine
tattgggatccatggtatatt

SEQ ID NO: 430 - RNA, 21 nt, synthetic construct
  source 1..21: mol_type = other RNA
  modified_base 1: mod_base = OTHER; note = 2'-deoxy nucleotide
  modified_base 20..21: mod_base = OTHER; note = 2'-deoxy nucleotide
  modified_base 3: mod_base = OTHER; note = 2'-OMe modified nucleotide
  modified_base 5: mod_base = OTHER; note = 2'-OMe modified nucleotide
  modified_base 7: mod_base = OTHER; note = 2'-OMe modified nucleotide
  modified_base 9: mod_base = OTHER; note = 2'-OMe modified nucleotide
  modified_base 11: mod_base = OTHER; note = 2'-OMe modified nucleotide
  modified_base 13: mod_base = OTHER; note = 2'-OMe modified nucleotide
  modified_base 15: mod_base = OTHER; note = 2'-OMe modified nucleotide
  modified_base 17: mod_base = OTHER; note = 2'-OMe modified nucleotide
  modified_base 19: mod_base = OTHER; note = 2'-OMe modified nucleotide
  modified_base 2: mod_base = OTHER; note = 2-deoxy-2-fluoro ribonucleotide
  modified_base 4: mod_base = OTHER; note = 2-deoxy-2-fluoro ribonucleotide
  modified_base 6: mod_base = OTHER; note = 2-deoxy-2-fluoro ribonucleotide
  modified_base 8: mod_base = OTHER; note = 2-deoxy-2-fluoro ribonucleotide
  modified_base 10: mod_base = OTHER; note = 2-deoxy-2-fluoro ribonucleotide
  modified_base 12: mod_base = OTHER; note = 2-deoxy-2-fluoro ribonucleotide
  modified_base 14: mod_base = OTHER; note = 2-deoxy-2-fluoro ribonucleotide
  modified_base 16: mod_base = OTHER; note = 2-deoxy-2-fluoro ribonucleotide
  modified_base 18: mod_base = OTHER; note = 2-deoxy-2-fluoro ribonucleotide
  modified_base 20..21: mod_base = OTHER; note = phosphorothioate internucleotide linkage
  modified_base 1: mod_base = OTHER; note = Thymine
  modified_base 20..21: mod_base = OTHER; note = Thymine
tcattgggatccatggtattt

SEQ ID NO: 431 - RNA, 21 nt, synthetic construct
  source 1..21: mol_type = other RNA
  modified_base 1: mod_base = OTHER; note = 2'-deoxy nucleotide
  modified_base 20..21: mod_base = OTHER; note = 2'-deoxy nucleotide
  modified_base 3: mod_base = OTHER; note = 2'-OMe modified nucleotide
  modified_base 5: mod_base = OTHER; note = 2'-OMe modified nucleotide
  modified_base 7: mod_base = OTHER; note = 2'-OMe modified nucleotide
  modified_base 9: mod_base = OTHER; note = 2'-OMe modified nucleotide
  modified_base 11: mod_base = OTHER; note = 2'-OMe modified nucleotide
  modified_base 13: mod_base = OTHER; note = 2'-OMe modified nucleotide
  modified_base 15: mod_base = OTHER; note = 2'-OMe modified nucleotide
  modified_base 17: mod_base = OTHER; note = 2'-OMe modified nucleotide
  modified_base 19: mod_base = OTHER; note = 2'-OMe modified nucleotide
  modified_base 2: mod_base = OTHER; note = 2-deoxy-2-fluoro ribonucleotide
  modified_base 4: mod_base = OTHER; note = 2-deoxy-2-fluoro ribonucleotide
  modified_base 6: mod_base = OTHER; note = 2-deoxy-2-fluoro ribonucleotide
  modified_base 8: mod_base = OTHER; note = 2-deoxy-2-fluoro ribonucleotide
  modified_base 10: mod_base = OTHER; note = 2-deoxy-2-fluoro ribonucleotide
  modified_base 12: mod_base = OTHER; note = 2-deoxy-2-fluoro ribonucleotide
  modified_base 14: mod_base = OTHER; note = 2-deoxy-2-fluoro ribonucleotide
  modified_base 16: mod_base = OTHER; note = 2-deoxy-2-fluoro ribonucleotide
  modified_base 18: mod_base = OTHER; note = 2-deoxy-2-fluoro ribonucleotide
  modified_base 20..21: mod_base = OTHER; note = phosphorothioate internucleotide linkage
  modified_base 1: mod_base = OTHER; note = Thymine
  modified_base 20..21: mod_base = OTHER; note = Thymine
tacattgggatccatggtatt

SEQ ID NO: 432 - RNA, 21 nt, synthetic construct
  source 1..21: mol_type = other RNA
  modified_base 1: mod_base = OTHER; note = 2'-deoxy nucleotide
  modified_base 20..21: mod_base = OTHER; note = 2'-deoxy nucleotide
  modified_base 3: mod_base = OTHER; note = 2'-OMe modified nucleotide
  modified_base 5: mod_base = OTHER; note = 2'-OMe modified nucleotide
  modified_base 7: mod_base = OTHER; note = 2'-OMe modified nucleotide
  modified_base 9: mod_base = OTHER; note = 2'-OMe modified nucleotide
  modified_base 11: mod_base = OTHER; note = 2'-OMe modified nucleotide
  modified_base 13: mod_base = OTHER; note = 2'-OMe modified nucleotide
  modified_base 15: mod_base = OTHER; note = 2'-OMe modified nucleotide
  modified_base 17: mod_base = OTHER; note = 2'-OMe modified nucleotide
  modified_base 19: mod_base = OTHER; note = 2'-OMe modified nucleotide
  modified_base 2: mod_base = OTHER; note = 2-deoxy-2-fluoro ribonucleotide
  modified_base 4: mod_base = OTHER; note = 2-deoxy-2-fluoro ribonucleotide
  modified_base 6: mod_base = OTHER; note = 2-deoxy-2-fluoro ribonucleotide
  modified_base 8: mod_base = OTHER; note = 2-deoxy-2-fluoro ribonucleotide
  modified_base 10: mod_base = OTHER; note = 2-deoxy-2-fluoro ribonucleotide
  modified_base 12: mod_base = OTHER; note = 2-deoxy-2-fluoro ribonucleotide
  modified_base 14: mod_base = OTHER; note = 2-deoxy-2-fluoro ribonucleotide
  modified_base 16: mod_base = OTHER; note = 2-deoxy-2-fluoro ribonucleotide
  modified_base 18: mod_base = OTHER; note = 2-deoxy-2-fluoro ribonucleotide
  modified_base 20..21: mod_base = OTHER; note = phosphorothioate internucleotide linkage
  modified_base 1: mod_base = OTHER; note = Thymine
  modified_base 20..21: mod_base = OTHER; note = Thymine
tgacattgggatccatggttt

SEQ ID NO: 433 - RNA, 21 nt, synthetic construct
  source 1..21: mol_type = other RNA
  modified_base 1: mod_base = OTHER; note = 2'-deoxy nucleotide
  modified_base 20..21: mod_base = OTHER; note = 2'-deoxy nucleotide
  modified_base 3: mod_base = OTHER; note = 2'-OMe modified nucleotide
  modified_base 5: mod_base = OTHER; note = 2'-OMe modified nucleotide
  modified_base 7: mod_base = OTHER; note = 2'-OMe modified nucleotide
  modified_base 9: mod_base = OTHER; note = 2'-OMe modified nucleotide
  modified_base 11: mod_base = OTHER; note = 2'-OMe modified nucleotide
  modified_base 13: mod_base = OTHER; note = 2'-OMe modified nucleotide
  modified_base 15: mod_base = OTHER; note = 2'-OMe modified nucleotide
  modified_base 17: mod_base = OTHER; note = 2'-OMe modified nucleotide
  modified_base 19: mod_base = OTHER; note = 2'-OMe modified nucleotide
  modified_base 2: mod_base = OTHER; note = 2-deoxy-2-fluoro ribonucleotide
  modified_base 4: mod_base = OTHER; note = 2-deoxy-2-fluoro ribonucleotide
  modified_base 6: mod_base = OTHER; note = 2-deoxy-2-fluoro ribonucleotide
  modified_base 8: mod_base = OTHER; note = 2-deoxy-2-fluoro ribonucleotide
  modified_base 10: mod_base = OTHER; note = 2-deoxy-2-fluoro ribonucleotide
  modified_base 12: mod_base = OTHER; note = 2-deoxy-2-fluoro ribonucleotide
  modified_base 14: mod_base = OTHER; note = 2-deoxy-2-fluoro ribonucleotide
  modified_base 16: mod_base = OTHER; note = 2-deoxy-2-fluoro ribonucleotide
  modified_base 18: mod_base = OTHER; note = 2-deoxy-2-fluoro ribonucleotide
  modified_base 20..21: mod_base = OTHER; note = phosphorothioate internucleotide linkage
  modified_base 1: mod_base = OTHER; note = Thymine
  modified_base 20..21: mod_base = OTHER; note = Thymine
tgacattgtgtcaggttgctt

SEQ ID NO: 434 - RNA, 21 nt, synthetic construct
  source 1..21: mol_type = other RNA
  modified_base 1: mod_base = OTHER; note = 2'-deoxy nucleotide
  modified_base 20..21: mod_base = OTHER; note = 2'-deoxy nucleotide
  modified_base 3: mod_base = OTHER; note = 2'-OMe modified nucleotide
  modified_base 5: mod_base = OTHER; note = 2'-OMe modified nucleotide
  modified_base 7: mod_base = OTHER; note = 2'-OMe modified nucleotide
  modified_base 9: mod_base = OTHER; note = 2'-OMe modified nucleotide
  modified_base 11: mod_base = OTHER; note = 2'-OMe modified nucleotide
  modified_base 13: mod_base = OTHER; note = 2'-OMe modified nucleotide
  modified_base 15: mod_base = OTHER; note = 2'-OMe modified nucleotide
  modified_base 17: mod_base = OTHER; note = 2'-OMe modified nucleotide
  modified_base 19: mod_base = OTHER; note = 2'-OMe modified nucleotide
  modified_base 2: mod_base = OTHER; note = 2-deoxy-2-fluoro ribonucleotide
  modified_base 4: mod_base = OTHER; note = 2-deoxy-2-fluoro ribonucleotide
  modified_base 6: mod_base = OTHER; note = 2-deoxy-2-fluoro ribonucleotide
  modified_base 8: mod_base = OTHER; note = 2-deoxy-2-fluoro ribonucleotide
  modified_base 10: mod_base = OTHER; note = 2-deoxy-2-fluoro ribonucleotide
  modified_base 12: mod_base = OTHER; note = 2-deoxy-2-fluoro ribonucleotide
  modified_base 14: mod_base = OTHER; note = 2-deoxy-2-fluoro ribonucleotide
  modified_base 16: mod_base = OTHER; note = 2-deoxy-2-fluoro ribonucleotide
  modified_base 18: mod_base = OTHER; note = 2-deoxy-2-fluoro ribonucleotide
  modified_base 20..21: mod_base = OTHER; note = phosphorothioate internucleotide linkage
  modified_base 1: mod_base = OTHER; note = Thymine
  modified_base 20..21: mod_base = OTHER; note = Thymine
tcactggacattgtgtcagtt

SEQ ID NO: 435 - RNA, 21 nt, synthetic construct
  source 1..21: mol_type = other RNA
  modified_base 1: mod_base = OTHER; note = 2'-deoxy nucleotide
  modified_base 20..21: mod_base = OTHER; note = 2'-deoxy nucleotide
  modified_base 3: mod_base = OTHER; note = 2'-OMe modified nucleotide
  modified_base 5: mod_base = OTHER; note = 2'-OMe modified nucleotide
  modified_base 7: mod_base = OTHER; note = 2'-OMe modified nucleotide
  modified_base 9: mod_base = OTHER; note = 2'-OMe modified nucleotide
  modified_base 11: mod_base = OTHER; note = 2'-OMe modified nucleotide
  modified_base 13: mod_base = OTHER; note = 2'-OMe modified nucleotide
  modified_base 15: mod_base = OTHER; note = 2'-OMe modified nucleotide
  modified_base 17: mod_base = OTHER; note = 2'-OMe modified nucleotide
  modified_base 19: mod_base = OTHER; note = 2'-OMe modified nucleotide
  modified_base 2: mod_base = OTHER; note = 2-deoxy-2-fluoro ribonucleotide
  modified_base 4: mod_base = OTHER; note = 2-deoxy-2-fluoro ribonucleotide
  modified_base 6: mod_base = OTHER; note = 2-deoxy-2-fluoro ribonucleotide
  modified_base 8: mod_base = OTHER; note = 2-deoxy-2-fluoro ribonucleotide
  modified_base 10: mod_base = OTHER; note = 2-deoxy-2-fluoro ribonucleotide
  modified_base 12: mod_base = OTHER; note = 2-deoxy-2-fluoro ribonucleotide
  modified_base 14: mod_base = OTHER; note = 2-deoxy-2-fluoro ribonucleotide
  modified_base 16: mod_base = OTHER; note = 2-deoxy-2-fluoro ribonucleotide
  modified_base 18: mod_base = OTHER; note = 2-deoxy-2-fluoro ribonucleotide
  modified_base 20..21: mod_base = OTHER; note = phosphorothioate internucleotide linkage
  modified_base 1: mod_base = OTHER; note = Thymine
  modified_base 20..21: mod_base = OTHER; note = Thymine
tacttgattctgtcactggtt

SEQ ID NO: 436 - RNA, 21 nt, synthetic construct
  source 1..21: mol_type = other RNA
  modified_base 1: mod_base = OTHER; note = 2'-deoxy nucleotide
  modified_base 20..21: mod_base = OTHER; note = 2'-deoxy nucleotide
  modified_base 3: mod_base = OTHER; note = 2'-OMe modified nucleotide
  modified_base 5: mod_base = OTHER; note = 2'-OMe modified nucleotide
  modified_base 7: mod_base = OTHER; note = 2'-OMe modified nucleotide
  modified_base 9: mod_base = OTHER; note = 2'-OMe modified nucleotide
  modified_base 11: mod_base = OTHER; note = 2'-OMe modified nucleotide
  modified_base 13: mod_base = OTHER; note = 2'-OMe modified nucleotide
  modified_base 15: mod_base = OTHER; note = 2'-OMe modified nucleotide
  modified_base 17: mod_base = OTHER; note = 2'-OMe modified nucleotide
  modified_base 19: mod_base = OTHER; note = 2'-OMe modified nucleotide
  modified_base 2: mod_base = OTHER; note = 2-deoxy-2-fluoro ribonucleotide
  modified_base 4: mod_base = OTHER; note = 2-deoxy-2-fluoro ribonucleotide
  modified_base 6: mod_base = OTHER; note = 2-deoxy-2-fluoro ribonucleotide
  modified_base 8: mod_base = OTHER; note = 2-deoxy-2-fluoro ribonucleotide
  modified_base 10: mod_base = OTHER; note = 2-deoxy-2-fluoro ribonucleotide
  modified_base 12: mod_base = OTHER; note = 2-deoxy-2-fluoro ribonucleotide
  modified_base 14: mod_base = OTHER; note = 2-deoxy-2-fluoro ribonucleotide
  modified_base 16: mod_base = OTHER; note = 2-deoxy-2-fluoro ribonucleotide
  modified_base 18: mod_base = OTHER; note = 2-deoxy-2-fluoro ribonucleotide
  modified_base 20..21: mod_base = OTHER; note = phosphorothioate internucleotide linkage
  modified_base 1: mod_base = OTHER; note = Thymine
  modified_base 20..21: mod_base = OTHER; note = Thymine
tgagaatgagcctcgataatt

SEQ ID NO: 437 - RNA, 21 nt, synthetic construct
  source 1..21: mol_type = other RNA
  modified_base 1: mod_base = OTHER; note = 2'-deoxy nucleotide
  modified_base 20..21: mod_base = OTHER; note = 2'-deoxy nucleotide
  modified_base 3: mod_base = OTHER; note = 2'-OMe modified nucleotide
  modified_base 5: mod_base = OTHER; note = 2'-OMe modified nucleotide
  modified_base 7: mod_base = OTHER; note = 2'-OMe modified nucleotide
  modified_base 9: mod_base = OTHER; note = 2'-OMe modified nucleotide
  modified_base 11: mod_base = OTHER; note = 2'-OMe modified nucleotide
  modified_base 13: mod_base = OTHER; note = 2'-OMe modified nucleotide
  modified_base 15: mod_base = OTHER; note = 2'-OMe modified nucleotide
  modified_base 17: mod_base = OTHER; note = 2'-OMe modified nucleotide
  modified_base 19: mod_base = OTHER; note = 2'-OMe modified nucleotide
  modified_base 2: mod_base = OTHER; note = 2-deoxy-2-fluoro ribonucleotide
  modified_base 4: mod_base = OTHER; note = 2-deoxy-2-fluoro ribonucleotide
  modified_base 6: mod_base = OTHER; note = 2-deoxy-2-fluoro ribonucleotide
  modified_base 8: mod_base = OTHER; note = 2-deoxy-2-fluoro ribonucleotide
  modified_base 10: mod_base = OTHER; note = 2-deoxy-2-fluoro ribonucleotide
  modified_base 12: mod_base = OTHER; note = 2-deoxy-2-fluoro ribonucleotide
  modified_base 14: mod_base = OTHER; note = 2-deoxy-2-fluoro ribonucleotide
  modified_base 16: mod_base = OTHER; note = 2-deoxy-2-fluoro ribonucleotide
  modified_base 18: mod_base = OTHER; note = 2-deoxy-2-fluoro ribonucleotide
  modified_base 20..21: mod_base = OTHER; note = phosphorothioate internucleotide linkage
  modified_base 1: mod_base = OTHER; note = Thymine
  modified_base 20..21: mod_base = OTHER; note = Thymine
tccatttgggtagtattcttt

SEQ ID NO: 438 - RNA, 21 nt, synthetic construct
  source 1..21: mol_type = other RNA
  modified_base 1: mod_base = OTHER; note = 2'-deoxy nucleotide
  modified_base 20..21: mod_base = OTHER; note = 2'-deoxy nucleotide
  modified_base 3: mod_base = OTHER; note = 2'-OMe modified nucleotide
  modified_base 5: mod_base = OTHER; note = 2'-OMe modified nucleotide
  modified_base 7: mod_base = OTHER; note = 2'-OMe modified nucleotide
  modified_base 9: mod_base = OTHER; note = 2'-OMe modified nucleotide
  modified_base 11: mod_base = OTHER; note = 2'-OMe modified nucleotide
  modified_base 13: mod_base = OTHER; note = 2'-OMe modified nucleotide
  modified_base 15: mod_base = OTHER; note = 2'-OMe modified nucleotide
  modified_base 17: mod_base = OTHER; note = 2'-OMe modified nucleotide
  modified_base 19: mod_base = OTHER; note = 2'-OMe modified nucleotide
  modified_base 2: mod_base = OTHER; note = 2-deoxy-2-fluoro ribonucleotide
  modified_base 4: mod_base = OTHER; note = 2-deoxy-2-fluoro ribonucleotide
  modified_base 6: mod_base = OTHER; note = 2-deoxy-2-fluoro ribonucleotide
  modified_base 8: mod_base = OTHER; note = 2-deoxy-2-fluoro ribonucleotide
  modified_base 10: mod_base = OTHER; note = 2-deoxy-2-fluoro ribonucleotide
  modified_base 12: mod_base = OTHER; note = 2-deoxy-2-fluoro ribonucleotide
  modified_base 14: mod_base = OTHER; note = 2-deoxy-2-fluoro ribonucleotide
  modified_base 16: mod_base = OTHER; note = 2-deoxy-2-fluoro ribonucleotide
  modified_base 18: mod_base = OTHER; note = 2-deoxy-2-fluoro ribonucleotide
  modified_base 20..21: mod_base = OTHER; note = phosphorothioate internucleotide linkage
  modified_base 1: mod_base = OTHER; note = Thymine
  modified_base 20..21: mod_base = OTHER; note = Thymine
tcaccatttgggtagtatttt

SEQ ID NO: 439 - RNA, 21 nt, synthetic construct
  source 1..21: mol_type = other RNA
  modified_base 1: mod_base = OTHER; note = 2'-deoxy nucleotide
  modified_base 20..21: mod_base = OTHER; note = 2'-deoxy nucleotide
  modified_base 3: mod_base = OTHER; note = 2'-OMe modified nucleotide
  modified_base 5: mod_base = OTHER; note = 2'-OMe modified nucleotide
  modified_base 7: mod_base = OTHER; note = 2'-OMe modified nucleotide
  modified_base 9: mod_base = OTHER; note = 2'-OMe modified nucleotide
  modified_base 11: mod_base = OTHER; note = 2'-OMe modified nucleotide
  modified_base 13: mod_base = OTHER; note = 2'-OMe modified nucleotide
  modified_base 15: mod_base = OTHER; note = 2'-OMe modified nucleotide
  modified_base 17: mod_base = OTHER; note = 2'-OMe modified nucleotide
  modified_base 19: mod_base = OTHER; note = 2'-OMe modified nucleotide
  modified_base 2: mod_base = OTHER; note = 2-deoxy-2-fluoro ribonucleotide
  modified_base 4: mod_base = OTHER; note = 2-deoxy-2-fluoro ribonucleotide
  modified_base 6: mod_base = OTHER; note = 2-deoxy-2-fluoro ribonucleotide
  modified_base 8: mod_base = OTHER; note = 2-deoxy-2-fluoro ribonucleotide
  modified_base 10: mod_base = OTHER; note = 2-deoxy-2-fluoro ribonucleotide
  modified_base 12: mod_base = OTHER; note = 2-deoxy-2-fluoro ribonucleotide
  modified_base 14: mod_base = OTHER; note = 2-deoxy-2-fluoro ribonucleotide
  modified_base 16: mod_base = OTHER; note = 2-deoxy-2-fluoro ribonucleotide
  modified_base 18: mod_base = OTHER; note = 2-deoxy-2-fluoro ribonucleotide
  modified_base 20..21: mod_base = OTHER; note = phosphorothioate internucleotide linkage
  modified_base 1: mod_base = OTHER; note = Thymine
  modified_base 20..21: mod_base = OTHER; note = Thymine
tccaccatttgggtagtattt

SEQ ID NO: 440 - RNA, 21 nt, synthetic construct
  source 1..21: mol_type = other RNA
  modified_base 1: mod_base = OTHER; note = 2'-deoxy nucleotide
  modified_base 20..21: mod_base = OTHER; note = 2'-deoxy nucleotide
  modified_base 3: mod_base = OTHER; note = 2'-OMe modified nucleotide
  modified_base 5: mod_base = OTHER; note = 2'-OMe modified nucleotide
  modified_base 7: mod_base = OTHER; note = 2'-OMe modified nucleotide
  modified_base 9: mod_base = OTHER; note = 2'-OMe modified nucleotide
  modified_base 11: mod_base = OTHER; note = 2'-OMe modified nucleotide
  modified_base 13: mod_base = OTHER; note = 2'-OMe modified nucleotide
  modified_base 15: mod_base = OTHER; note = 2'-OMe modified nucleotide
  modified_base 17: mod_base = OTHER; note = 2'-OMe modified nucleotide
  modified_base 19: mod_base = OTHER; note = 2'-OMe modified nucleotide
  modified_base 2: mod_base = OTHER; note = 2-deoxy-2-fluoro ribonucleotide
  modified_base 4: mod_base = OTHER; note = 2-deoxy-2-fluoro ribonucleotide
  modified_base 6: mod_base = OTHER; note = 2-deoxy-2-fluoro ribonucleotide
  modified_base 8: mod_base = OTHER; note = 2-deoxy-2-fluoro ribonucleotide
  modified_base 10: mod_base = OTHER; note = 2-deoxy-2-fluoro ribonucleotide
  modified_base 12: mod_base = OTHER; note = 2-deoxy-2-fluoro ribonucleotide
  modified_base 14: mod_base = OTHER; note = 2-deoxy-2-fluoro ribonucleotide
  modified_base 16: mod_base = OTHER; note = 2-deoxy-2-fluoro ribonucleotide
  modified_base 18: mod_base = OTHER; note = 2-deoxy-2-fluoro ribonucleotide
  modified_base 20..21: mod_base = OTHER; note = phosphorothioate internucleotide linkage
  modified_base 1: mod_base = OTHER; note = Thymine
  modified_base 20..21: mod_base = OTHER; note = Thymine
tataacaccaagggcgaattt

SEQ ID NO: 441 - RNA, 21 nt, synthetic construct
  source 1..21: mol_type = other RNA
  modified_base 1: mod_base = OTHER; note = 2'-deoxy nucleotide
  modified_base 20..21: mod_base = OTHER; note = 2'-deoxy nucleotide
  modified_base 3: mod_base = OTHER; note = 2'-OMe modified nucleotide
  modified_base 5: mod_base = OTHER; note = 2'-OMe modified nucleotide
  modified_base 7: mod_base = OTHER; note = 2'-OMe modified nucleotide
  modified_base 9: mod_base = OTHER; note = 2'-OMe modified nucleotide
  modified_base 11: mod_base = OTHER; note = 2'-OMe modified nucleotide
  modified_base 13: mod_base = OTHER; note = 2'-OMe modified nucleotide
  modified_base 15: mod_base = OTHER; note = 2'-OMe modified nucleotide
  modified_base 17: mod_base = OTHER; note = 2'-OMe modified nucleotide
  modified_base 19: mod_base = OTHER; note = 2'-OMe modified nucleotide
  modified_base 2: mod_base = OTHER; note = 2-deoxy-2-fluoro ribonucleotide
  modified_base 4: mod_base = OTHER; note = 2-deoxy-2-fluoro ribonucleotide
  modified_base 6: mod_base = OTHER; note = 2-deoxy-2-fluoro ribonucleotide
  modified_base 8: mod_base = OTHER; note = 2-deoxy-2-fluoro ribonucleotide
  modified_base 10: mod_base = OTHER; note = 2-deoxy-2-fluoro ribonucleotide
  modified_base 12: mod_base = OTHER; note = 2-deoxy-2-fluoro ribonucleotide
  modified_base 14: mod_base = OTHER; note = 2-deoxy-2-fluoro ribonucleotide
  modified_base 16: mod_base = OTHER; note = 2-deoxy-2-fluoro ribonucleotide
  modified_base 18: mod_base = OTHER; note = 2-deoxy-2-fluoro ribonucleotide
  modified_base 20..21: mod_base = OTHER; note = phosphorothioate internucleotide linkage
  modified_base 1: mod_base = OTHER; note = Thymine
  modified_base 20..21: mod_base = OTHER; note = Thymine
tactgggatccatggtatatt

SEQ ID NO: 442 - RNA, 21 nt, synthetic construct
  source 1..21: mol_type = other RNA
  modified_base 1: mod_base = OTHER; note = 2'-deoxy nucleotide
  modified_base 20..21: mod_base = OTHER; note = 2'-deoxy nucleotide
  modified_base 3: mod_base = OTHER; note = 2'-OMe modified nucleotide
  modified_base 5: mod_base = OTHER; note = 2'-OMe modified nucleotide
  modified_base 7: mod_base = OTHER; note = 2'-OMe modified nucleotide
  modified_base 9: mod_base = OTHER; note = 2'-OMe modified nucleotide
  modified_base 11: mod_base = OTHER; note = 2'-OMe modified nucleotide
  modified_base 13: mod_base = OTHER; note = 2'-OMe modified nucleotide
  modified_base 15: mod_base = OTHER; note = 2'-OMe modified nucleotide
  modified_base 17: mod_base = OTHER; note = 2'-OMe modified nucleotide
  modified_base 19: mod_base = OTHER; note = 2'-OMe modified nucleotide
  modified_base 2: mod_base = OTHER; note = 2-deoxy-2-fluoro ribonucleotide
  modified_base 4: mod_base = OTHER; note = 2-deoxy-2-fluoro ribonucleotide
  modified_base 6: mod_base = OTHER; note = 2-deoxy-2-fluoro ribonucleotide
  modified_base 8: mod_base = OTHER; note = 2-deoxy-2-fluoro ribonucleotide
  modified_base 10: mod_base = OTHER; note = 2-deoxy-2-fluoro ribonucleotide
  modified_base 12: mod_base = OTHER; note = 2-deoxy-2-fluoro ribonucleotide
  modified_base 14: mod_base = OTHER; note = 2-deoxy-2-fluoro ribonucleotide
  modified_base 16: mod_base = OTHER; note = 2-deoxy-2-fluoro ribonucleotide
  modified_base 18: mod_base = OTHER; note = 2-deoxy-2-fluoro ribonucleotide
  modified_base 20..21: mod_base = OTHER; note = phosphorothioate internucleotide linkage
  modified_base 1: mod_base = OTHER; note = Thymine
  modified_base 20..21: mod_base = OTHER; note = Thymine
tcactgggatccatggtattt

SEQ ID NO: 443 - RNA, 21 nt, synthetic construct
  source 1..21: mol_type = other RNA
  modified_base 1: mod_base = OTHER; note = 2'-deoxy nucleotide
  modified_base 20..21: mod_base = OTHER; note = 2'-deoxy nucleotide
  modified_base 3: mod_base = OTHER; note = 2'-OMe modified nucleotide
  modified_base 5: mod_base = OTHER; note = 2'-OMe modified nucleotide
  modified_base 7: mod_base = OTHER; note = 2'-OMe modified nucleotide
  modified_base 9: mod_base = OTHER; note = 2'-OMe modified nucleotide
  modified_base 11: mod_base = OTHER; note = 2'-OMe modified nucleotide
  modified_base 13: mod_base = OTHER; note = 2'-OMe modified nucleotide
  modified_base 15: mod_base = OTHER; note = 2'-OMe modified nucleotide
  modified_base 17: mod_base = OTHER; note = 2'-OMe modified nucleotide
  modified_base 19: mod_base = OTHER; note = 2'-OMe modified nucleotide
  modified_base 2: mod_base = OTHER; note = 2-deoxy-2-fluoro ribonucleotide
  modified_base 4: mod_base = OTHER; note = 2-deoxy-2-fluoro ribonucleotide
  modified_base 6: mod_base = OTHER; note = 2-deoxy-2-fluoro ribonucleotide
  modified_base 8: mod_base = OTHER; note = 2-deoxy-2-fluoro ribonucleotide
  modified_base 10: mod_base = OTHER; note = 2-deoxy-2-fluoro ribonucleotide
  modified_base 12: mod_base = OTHER; note = 2-deoxy-2-fluoro ribonucleotide
  modified_base 14: mod_base = OTHER; note = 2-deoxy-2-fluoro ribonucleotide
  modified_base 16: mod_base = OTHER; note = 2-deoxy-2-fluoro ribonucleotide
  modified_base 18: mod_base = OTHER; note = 2-deoxy-2-fluoro ribonucleotide
  modified_base 20..21: mod_base = OTHER; note = phosphorothioate internucleotide linkage
  modified_base 1: mod_base = OTHER; note = Thymine
  modified_base 20..21: mod_base = OTHER; note = Thymine
taccaccgtgggagttgtgtt

SEQ ID NO: 444 - RNA, 21 nt, synthetic construct
  source 1..21: mol_type = other RNA
  modified_base 1: mod_base = OTHER; note = 2'-deoxy nucleotide
  modified_base 20..21: mod_base = OTHER; note = 2'-deoxy nucleotide
  modified_base 3: mod_base = OTHER; note = 2'-OMe modified nucleotide
  modified_base 5: mod_base = OTHER; note = 2'-OMe modified nucleotide
  modified_base 7: mod_base = OTHER; note = 2'-OMe modified nucleotide
  modified_base 9: mod_base = OTHER; note = 2'-OMe modified nucleotide
  modified_base 11: mod_base = OTHER; note = 2'-OMe modified nucleotide
  modified_base 13: mod_base = OTHER; note = 2'-OMe modified nucleotide
  modified_base 15: mod_base = OTHER; note = 2'-OMe modified nucleotide
  modified_base 17: mod_base = OTHER; note = 2'-OMe modified nucleotide
  modified_base 19: mod_base = OTHER; note = 2'-OMe modified nucleotide
  modified_base 2: mod_base = OTHER; note = 2-deoxy-2-fluoro ribonucleotide
  modified_base 4: mod_base = OTHER; note = 2-deoxy-2-fluoro ribonucleotide
  modified_base 6: mod_base = OTHER; note = 2-deoxy-2-fluoro ribonucleotide
  modified_base 8: mod_base = OTHER; note = 2-deoxy-2-fluoro ribonucleotide
  modified_base 10: mod_base = OTHER; note = 2-deoxy-2-fluoro ribonucleotide
  modified_base 12: mod_base = OTHER; note = 2-deoxy-2-fluoro ribonucleotide
  modified_base 14: mod_base = OTHER; note = 2-deoxy-2-fluoro ribonucleotide
  modified_base 16: mod_base = OTHER; note = 2-deoxy-2-fluoro ribonucleotide
  modified_base 18: mod_base = OTHER; note = 2-deoxy-2-fluoro ribonucleotide
  modified_base 20..21: mod_base = OTHER; note = phosphorothioate internucleotide linkage
  modified_base 1: mod_base = OTHER; note = Thymine
  modified_base 20..21: mod_base = OTHER; note = Thymine
tcaagactgacatgttctttt

SEQ ID NO: 445 - RNA, 21 nt, synthetic construct
  source 1..21: mol_type = other RNA
  modified_base 1: mod_base = OTHER; note = 2'-deoxy nucleotide
  modified_base 20..21: mod_base = OTHER; note = 2'-deoxy nucleotide
  modified_base 3: mod_base = OTHER; note = 2'-OMe modified nucleotide
  modified_base 5: mod_base = OTHER; note = 2'-OMe modified nucleotide
  modified_base 7: mod_base = OTHER; note = 2'-OMe modified nucleotide
  modified_base 9: mod_base = OTHER; note = 2'-OMe modified nucleotide
  modified_base 11: mod_base = OTHER; note = 2'-OMe modified nucleotide
  modified_base 13: mod_base = OTHER; note = 2'-OMe modified nucleotide
  modified_base 15: mod_base = OTHER; note = 2'-OMe modified nucleotide
  modified_base 17: mod_base = OTHER; note = 2'-OMe modified nucleotide
  modified_base 19: mod_base = OTHER; note = 2'-OMe modified nucleotide
  modified_base 2: mod_base = OTHER; note = 2-deoxy-2-fluoro ribonucleotide
  modified_base 4: mod_base = OTHER; note = 2-deoxy-2-fluoro ribonucleotide
  modified_base 6: mod_base = OTHER; note = 2-deoxy-2-fluoro ribonucleotide
  modified_base 8: mod_base = OTHER; note = 2-deoxy-2-fluoro ribonucleotide
  modified_base 10: mod_base = OTHER; note = 2-deoxy-2-fluoro ribonucleotide
  modified_base 12: mod_base = OTHER; note = 2-deoxy-2-fluoro ribonucleotide
  modified_base 14: mod_base = OTHER; note = 2-deoxy-2-fluoro ribonucleotide
  modified_base 16: mod_base = OTHER; note = 2-deoxy-2-fluoro ribonucleotide
  modified_base 18: mod_base = OTHER; note = 2-deoxy-2-fluoro ribonucleotide
  modified_base 20..21: mod_base = OTHER; note = phosphorothioate internucleotide linkage
  modified_base 1: mod_base = OTHER; note = Thymine
  modified_base 20..21: mod_base = OTHER; note = Thymine
tgggagttgtgaggacacttt

SEQ ID NO: 446 - RNA, 21 nt, synthetic construct
  source 1..21: mol_type = other RNA
  modified_base 1: mod_base = OTHER; note = 2'-deoxy nucleotide
  modified_base 20..21: mod_base = OTHER; note = 2'-deoxy nucleotide
  modified_base 3: mod_base = OTHER; note = 2'-OMe modified nucleotide
  modified_base 5: mod_base = OTHER; note = 2'-OMe modified nucleotide
  modified_base 7: mod_base = OTHER; note = 2'-OMe modified nucleotide
  modified_base 9: mod_base = OTHER; note = 2'-OMe modified nucleotide
  modified_base 11: mod_base = OTHER; note = 2'-OMe modified nucleotide
  modified_base 13: mod_base = OTHER; note = 2'-OMe modified nucleotide
  modified_base 15: mod_base = OTHER; note = 2'-OMe modified nucleotide
  modified_base 17: mod_base = OTHER; note = 2'-OMe modified nucleotide
  modified_base 19: mod_base = OTHER; note = 2'-OMe modified nucleotide
  modified_base 2: mod_base = OTHER; note = 2-deoxy-2-fluoro ribonucleotide
  modified_base 4: mod_base = OTHER; note = 2-deoxy-2-fluoro ribonucleotide
  modified_base 6: mod_base = OTHER; note = 2-deoxy-2-fluoro ribonucleotide
  modified_base 8: mod_base = OTHER; note = 2-deoxy-2-fluoro ribonucleotide
  modified_base 10: mod_base = OTHER; note = 2-deoxy-2-fluoro ribonucleotide
  modified_base 12: mod_base = OTHER; note = 2-deoxy-2-fluoro ribonucleotide
  modified_base 14: mod_base = OTHER; note = 2-deoxy-2-fluoro ribonucleotide
  modified_base 16: mod_base = OTHER; note = 2-deoxy-2-fluoro ribonucleotide
  modified_base 18: mod_base = OTHER; note = 2-deoxy-2-fluoro ribonucleotide
  modified_base 20..21: mod_base = OTHER; note = phosphorothioate internucleotide linkage
  modified_base 1: mod_base = OTHER; note = Thymine
  modified_base 20..21: mod_base = OTHER; note = Thymine
ttctcaggtggtgcttgtttt

SEQ ID NO: 447 - RNA, 21 nt, synthetic construct
  source 1..21: mol_type = other RNA
  modified_base 1: mod_base = OTHER; note = 2'-deoxy nucleotide
  modified_base 20..21: mod_base = OTHER; note = 2'-deoxy nucleotide
  modified_base 3: mod_base = OTHER; note = 2'-OMe modified nucleotide
  modified_base 5: mod_base = OTHER; note = 2'-OMe modified nucleotide
  modified_base 7: mod_base = OTHER; note = 2'-OMe modified nucleotide
  modified_base 9: mod_base = OTHER; note = 2'-OMe modified nucleotide
  modified_base 11: mod_base = OTHER; note = 2'-OMe modified nucleotide
  modified_base 13: mod_base = OTHER; note = 2'-OMe modified nucleotide
  modified_base 15: mod_base = OTHER; note = 2'-OMe modified nucleotide
  modified_base 17: mod_base = OTHER; note = 2'-OMe modified nucleotide
  modified_base 19: mod_base = OTHER; note = 2'-OMe modified nucleotide
  modified_base 2: mod_base = OTHER; note = 2-deoxy-2-fluoro ribonucleotide
  modified_base 4: mod_base = OTHER; note = 2-deoxy-2-fluoro ribonucleotide
  modified_base 6: mod_base = OTHER; note = 2-deoxy-2-fluoro ribonucleotide
  modified_base 8: mod_base = OTHER; note = 2-deoxy-2-fluoro ribonucleotide
  modified_base 10: mod_base = OTHER; note = 2-deoxy-2-fluoro ribonucleotide
  modified_base 12: mod_base = OTHER; note = 2-deoxy-2-fluoro ribonucleotide
  modified_base 14: mod_base = OTHER; note = 2-deoxy-2-fluoro ribonucleotide
  modified_base 16: mod_base = OTHER; note = 2-deoxy-2-fluoro ribonucleotide
  modified_base 18: mod_base = OTHER; note = 2-deoxy-2-fluoro ribonucleotide
  modified_base 20..21: mod_base = OTHER; note = phosphorothioate internucleotide linkage
  modified_base 1: mod_base = OTHER; note = Thymine
  modified_base 20..21: mod_base = OTHER; note = Thymine
tcacagggcttttctcaggtt

SEQ ID NO: 448 - RNA, 21 nt, synthetic construct
  source 1..21: mol_type = other RNA
  modified_base 1: mod_base = OTHER; note = 2'-deoxy nucleotide
  modified_base 20..21: mod_base = OTHER; note = 2'-deoxy nucleotide
  modified_base 3: mod_base = OTHER; note = 2'-OMe modified nucleotide
  modified_base 5: mod_base = OTHER; note = 2'-OMe modified nucleotide
  modified_base 7: mod_base = OTHER; note = 2'-OMe modified nucleotide
  modified_base 9: mod_base = OTHER; note = 2'-OMe modified nucleotide
  modified_base 11: mod_base = OTHER; note = 2'-OMe modified nucleotide
  modified_base 13: mod_base = OTHER; note = 2'-OMe modified nucleotide
  modified_base 15: mod_base = OTHER; note = 2'-OMe modified nucleotide
  modified_base 17: mod_base = OTHER; note = 2'-OMe modified nucleotide
  modified_base 19: mod_base = OTHER; note = 2'-OMe modified nucleotide
  modified_base 2: mod_base = OTHER; note = 2-deoxy-2-fluoro ribonucleotide
  modified_base 4: mod_base = OTHER; note = 2-deoxy-2-fluoro ribonucleotide
  modified_base 6: mod_base = OTHER; note = 2-deoxy-2-fluoro ribonucleotide
  modified_base 8: mod_base = OTHER; note = 2-deoxy-2-fluoro ribonucleotide
  modified_base 10: mod_base = OTHER; note = 2-deoxy-2-fluoro ribonucleotide
  modified_base 12: mod_base = OTHER; note = 2-deoxy-2-fluoro ribonucleotide
  modified_base 14: mod_base = OTHER; note = 2-deoxy-2-fluoro ribonucleotide
  modified_base 16: mod_base = OTHER; note = 2-deoxy-2-fluoro ribonucleotide
  modified_base 18: mod_base = OTHER; note = 2-deoxy-2-fluoro ribonucleotide
  modified_base 20..21: mod_base = OTHER; note = phosphorothioate internucleotide linkage
  modified_base 1: mod_base = OTHER; note = Thymine
  modified_base 20..21: mod_base = OTHER; note = Thymine
tgatgccagtgtggtatcatt

SEQ ID NO: 449 - RNA, 21 nt, synthetic construct
  source 1..21: mol_type = other RNA
  modified_base 1: mod_base = OTHER; note = 2'-deoxy nucleotide
  modified_base 20..21: mod_base = OTHER; note = 2'-deoxy nucleotide
  modified_base 3: mod_base = OTHER; note = 2'-OMe modified nucleotide
  modified_base 5: mod_base = OTHER; note = 2'-OMe modified nucleotide
  modified_base 7: mod_base = OTHER; note = 2'-OMe modified nucleotide
  modified_base 9: mod_base = OTHER; note = 2'-OMe modified nucleotide
  modified_base 11: mod_base = OTHER; note = 2'-OMe modified nucleotide
  modified_base 13: mod_base = OTHER; note = 2'-OMe modified nucleotide
  modified_base 15: mod_base = OTHER; note = 2'-OMe modified nucleotide
  modified_base 17: mod_base = OTHER; note = 2'-OMe modified nucleotide
  modified_base 19: mod_base = OTHER; note = 2'-OMe modified nucleotide
  modified_base 2: mod_base = OTHER; note = 2-deoxy-2-fluoro ribonucleotide
  modified_base 4: mod_base = OTHER; note = 2-deoxy-2-fluoro ribonucleotide
  modified_base 6: mod_base = OTHER; note = 2-deoxy-2-fluoro ribonucleotide
  modified_base 8: mod_base = OTHER; note = 2-deoxy-2-fluoro ribonucleotide
  modified_base 10: mod_base = OTHER; note = 2-deoxy-2-fluoro ribonucleotide
  modified_base 12: mod_base = OTHER; note = 2-deoxy-2-fluoro ribonucleotide
  modified_base 14: mod_base = OTHER; note = 2-deoxy-2-fluoro ribonucleotide
  modified_base 16: mod_base = OTHER; note = 2-deoxy-2-fluoro ribonucleotide
  modified_base 18: mod_base = OTHER; note = 2-deoxy-2-fluoro ribonucleotide
  modified_base 20..21: mod_base = OTHER; note = phosphorothioate internucleotide linkage
  modified_base 1: mod_base = OTHER; note = Thymine
  modified_base 20..21: mod_base = OTHER; note = Thymine
ttgatgccagtgtggtatctt

SEQ ID NO: 450 - RNA, 21 nt, synthetic construct
  source 1..21: mol_type = other RNA
  modified_base 1: mod_base = OTHER; note = 2'-deoxy nucleotide
  modified_base 20..21: mod_base = OTHER; note = 2'-deoxy nucleotide
  modified_base 3: mod_base = OTHER; note = 2'-OMe modified nucleotide
  modified_base 5: mod_base = OTHER; note = 2'-OMe modified nucleotide
  modified_base 7: mod_base = OTHER; note = 2'-OMe modified nucleotide
  modified_base 9: mod_base = OTHER; note = 2'-OMe modified nucleotide
  modified_base 11: mod_base = OTHER; note = 2'-OMe modified nucleotide
  modified_base 13: mod_base = OTHER; note = 2'-OMe modified nucleotide
  modified_base 15: mod_base = OTHER; note = 2'-OMe modified nucleotide
  modified_base 17: mod_base = OTHER; note = 2'-OMe modified nucleotide
  modified_base 19: mod_base = OTHER; note = 2'-OMe modified nucleotide
  modified_base 2: mod_base = OTHER; note = 2-deoxy-2-fluoro ribonucleotide
  modified_base 4: mod_base = OTHER; note = 2-deoxy-2-fluoro ribonucleotide
  modified_base 6: mod_base = OTHER; note = 2-deoxy-2-fluoro ribonucleotide
  modified_base 8: mod_base = OTHER; note = 2-deoxy-2-fluoro ribonucleotide
  modified_base 10: mod_base = OTHER; note = 2-deoxy-2-fluoro ribonucleotide
  modified_base 12: mod_base = OTHER; note = 2-deoxy-2-fluoro ribonucleotide
  modified_base 14: mod_base = OTHER; note = 2-deoxy-2-fluoro ribonucleotide
  modified_base 16: mod_base = OTHER; note = 2-deoxy-2-fluoro ribonucleotide
  modified_base 18: mod_base = OTHER; note = 2-deoxy-2-fluoro ribonucleotide
  modified_base 20..21: mod_base = OTHER; note = phosphorothioate internucleotide linkage
  modified_base 1: mod_base = OTHER; note = Thymine
  modified_base 20..21: mod_base = OTHER; note = Thymine
tgacacctgattctgtttctt

SEQ ID NO: 451 - RNA, 21 nt, synthetic construct
  source 1..21: mol_type = other RNA
  modified_base 1: mod_base = OTHER; note = 2'-deoxy nucleotide
  modified_base 20..21: mod_base = OTHER; note = 2'-deoxy nucleotide
  modified_base 3: mod_base = OTHER; note = 2'-OMe modified nucleotide
  modified_base 5: mod_base = OTHER; note = 2'-OMe modified nucleotide
  modified_base 7: mod_base = OTHER; note = 2'-OMe modified nucleotide
  modified_base 9: mod_base = OTHER; note = 2'-OMe modified nucleotide
  modified_base 11: mod_base = OTHER; note = 2'-OMe modified nucleotide
  modified_base 13: mod_base = OTHER; note = 2'-OMe modified nucleotide
  modified_base 15: mod_base = OTHER; note = 2'-OMe modified nucleotide
  modified_base 17: mod_base = OTHER; note = 2'-OMe modified nucleotide
  modified_base 19: mod_base = OTHER; note = 2'-OMe modified nucleotide
  modified_base 2: mod_base = OTHER; note = 2-deoxy-2-fluoro ribonucleotide
  modified_base 4: mod_base = OTHER; note = 2-deoxy-2-fluoro ribonucleotide
  modified_base 6: mod_base = OTHER; note = 2-deoxy-2-fluoro ribonucleotide
  modified_base 8: mod_base = OTHER; note = 2-deoxy-2-fluoro ribonucleotide
  modified_base 10: mod_base = OTHER; note = 2-deoxy-2-fluoro ribonucleotide
  modified_base 12: mod_base = OTHER; note = 2-deoxy-2-fluoro ribonucleotide
  modified_base 14: mod_base = OTHER; note = 2-deoxy-2-fluoro ribonucleotide
  modified_base 16: mod_base = OTHER; note = 2-deoxy-2-fluoro ribonucleotide
  modified_base 18: mod_base = OTHER; note = 2-deoxy-2-fluoro ribonucleotide
  modified_base 20..21: mod_base = OTHER; note = phosphorothioate internucleotide linkage
  modified_base 1: mod_base = OTHER; note = Thymine
  modified_base 20..21: mod_base = OTHER; note = Thymine
tggacacctgattctgttttt

SEQ ID NO: 452 - RNA, 21 nt, synthetic construct
  source 1..21: mol_type = other RNA
  modified_base 1: mod_base = OTHER; note = 2'-deoxy nucleotide
  modified_base 20..21: mod_base = OTHER; note = 2'-deoxy nucleotide
  modified_base 3: mod_base = OTHER; note = 2'-OMe modified nucleotide
  modified_base 5: mod_base = OTHER; note = 2'-OMe modified nucleotide
  modified_base 7: mod_base = OTHER; note = 2'-OMe modified nucleotide
  modified_base 9: mod_base = OTHER; note = 2'-OMe modified nucleotide
  modified_base 11: mod_base = OTHER; note = 2'-OMe modified nucleotide
  modified_base 13: mod_base = OTHER; note = 2'-OMe modified nucleotide
  modified_base 15: mod_base = OTHER; note = 2'-OMe modified nucleotide
  modified_base 17: mod_base = OTHER; note = 2'-OMe modified nucleotide
  modified_base 19: mod_base = OTHER; note = 2'-OMe modified nucleotide
  modified_base 2: mod_base = OTHER; note = 2-deoxy-2-fluoro ribonucleotide
  modified_base 4: mod_base = OTHER; note = 2-deoxy-2-fluoro ribonucleotide
  modified_base 6: mod_base = OTHER; note = 2-deoxy-2-fluoro ribonucleotide
  modified_base 8: mod_base = OTHER; note = 2-deoxy-2-fluoro ribonucleotide
  modified_base 10: mod_base = OTHER; note = 2-deoxy-2-fluoro ribonucleotide
  modified_base 12: mod_base = OTHER; note = 2-deoxy-2-fluoro ribonucleotide
  modified_base 14: mod_base = OTHER; note = 2-deoxy-2-fluoro ribonucleotide
  modified_base 16: mod_base = OTHER; note = 2-deoxy-2-fluoro ribonucleotide
  modified_base 18: mod_base = OTHER; note = 2-deoxy-2-fluoro ribonucleotide
  modified_base 20..21: mod_base = OTHER; note = phosphorothioate internucleotide linkage
  modified_base 1: mod_base = OTHER; note = Thymine
  modified_base 20..21: mod_base = OTHER; note = Thymine
tctaggacacctgattctgtt

SEQ ID NO: 453 - RNA, 21 nt, synthetic construct
  source 1..21: mol_type = other RNA
  modified_base 1: mod_base = OTHER; note = 2'-deoxy nucleotide
  modified_base 20..21: mod_base = OTHER; note = 2'-deoxy nucleotide
  modified_base 3: mod_base = OTHER; note = 2'-OMe modified nucleotide
  modified_base 5: mod_base = OTHER; note = 2'-OMe modified nucleotide
  modified_base 7: mod_base = OTHER; note = 2'-OMe modified nucleotide
  modified_base 9: mod_base = OTHER; note = 2'-OMe modified nucleotide
  modified_base 11: mod_base = OTHER; note = 2'-OMe modified nucleotide
  modified_base 13: mod_base = OTHER; note = 2'-OMe modified nucleotide
  modified_base 15: mod_base = OTHER; note = 2'-OMe modified nucleotide
  modified_base 17: mod_base = OTHER; note = 2'-OMe modified nucleotide
  modified_base 19: mod_base = OTHER; note = 2'-OMe modified nucleotide
  modified_base 2: mod_base = OTHER; note = 2-deoxy-2-fluoro ribonucleotide
  modified_base 4: mod_base = OTHER; note = 2-deoxy-2-fluoro ribonucleotide
  modified_base 6: mod_base = OTHER; note = 2-deoxy-2-fluoro ribonucleotide
  modified_base 8: mod_base = OTHER; note = 2-deoxy-2-fluoro ribonucleotide
  modified_base 10: mod_base = OTHER; note = 2-deoxy-2-fluoro ribonucleotide
  modified_base 12: mod_base = OTHER; note = 2-deoxy-2-fluoro ribonucleotide
  modified_base 14: mod_base = OTHER; note = 2-deoxy-2-fluoro ribonucleotide
  modified_base 16: mod_base = OTHER; note = 2-deoxy-2-fluoro ribonucleotide
  modified_base 18: mod_base = OTHER; note = 2-deoxy-2-fluoro ribonucleotide
  modified_base 20..21: mod_base = OTHER; note = phosphorothioate internucleotide linkage
  modified_base 1: mod_base = OTHER; note = Thymine
  modified_base 20..21: mod_base = OTHER; note = Thymine
tataaggggctgccacaggtt

SEQ ID NO: 454 - RNA, 21 nt, synthetic construct
  source 1..21: mol_type = other RNA
  modified_base 1: mod_base = OTHER; note = 2'-deoxy nucleotide
  modified_base 20..21: mod_base = OTHER; note = 2'-deoxy nucleotide
  modified_base 3: mod_base = OTHER; note = 2'-OMe modified nucleotide
  modified_base 5: mod_base = OTHER; note = 2'-OMe modified nucleotide
  modified_base 7: mod_base = OTHER; note = 2'-OMe modified nucleotide
  modified_base 9: mod_base = OTHER; note = 2'-OMe modified nucleotide
  modified_base 11: mod_base = OTHER; note = 2'-OMe modified nucleotide
  modified_base 13: mod_base = OTHER; note = 2'-OMe modified nucleotide
  modified_base 15: mod_base = OTHER; note = 2'-OMe modified nucleotide
  modified_base 17: mod_base = OTHER; note = 2'-OMe modified nucleotide
  modified_base 19: mod_base = OTHER; note = 2'-OMe modified nucleotide
  modified_base 2: mod_base = OTHER; note = 2-deoxy-2-fluoro ribonucleotide
  modified_base 4: mod_base = OTHER; note = 2-deoxy-2-fluoro ribonucleotide
  modified_base 6: mod_base = OTHER; note = 2-deoxy-2-fluoro ribonucleotide
  modified_base 8: mod_base = OTHER; note = 2-deoxy-2-fluoro ribonucleotide
  modified_base 10: mod_base = OTHER; note = 2-deoxy-2-fluoro ribonucleotide
  modified_base 12: mod_base = OTHER; note = 2-deoxy-2-fluoro ribonucleotide
  modified_base 14: mod_base = OTHER; note = 2-deoxy-2-fluoro ribonucleotide
  modified_base 16: mod_base = OTHER; note = 2-deoxy-2-fluoro ribonucleotide
  modified_base 18: mod_base = OTHER; note = 2-deoxy-2-fluoro ribonucleotide
  modified_base 20..21: mod_base = OTHER; note = phosphorothioate internucleotide linkage
  modified_base 1: mod_base = OTHER; note = Thymine
  modified_base 20..21: mod_base = OTHER; note = Thymine
taacaataaggggctgccatt

SEQ ID NO: 455 - RNA, 21 nt, synthetic construct
  source 1..21: mol_type = other RNA
  modified_base 1: mod_base = OTHER; note = 2'-deoxy nucleotide
  modified_base 20..21: mod_base = OTHER; note = 2'-deoxy nucleotide
  modified_base 3: mod_base = OTHER; note = 2'-OMe modified nucleotide
  modified_base 5: mod_base = OTHER; note = 2'-OMe modified nucleotide
  modified_base 7: mod_base = OTHER; note = 2'-OMe modified nucleotide
  modified_base 9: mod_base = OTHER; note = 2'-OMe modified nucleotide
  modified_base 11: mod_base = OTHER; note = 2'-OMe modified nucleotide
  modified_base 13: mod_base = OTHER; note = 2'-OMe modified nucleotide
  modified_base 15: mod_base = OTHER; note = 2'-OMe modified nucleotide
  modified_base 17: mod_base = OTHER; note = 2'-OMe modified nucleotide
  modified_base 19: mod_base = OTHER; note = 2'-OMe modified nucleotide
  modified_base 2: mod_base = OTHER; note = 2-deoxy-2-fluoro ribonucleotide
  modified_base 4: mod_base = OTHER; note = 2-deoxy-2-fluoro ribonucleotide
  modified_base 6: mod_base = OTHER; note = 2-deoxy-2-fluoro ribonucleotide
  modified_base 8: mod_base = OTHER; note = 2-deoxy-2-fluoro ribonucleotide
  modified_base 10: mod_base = OTHER; note = 2-deoxy-2-fluoro ribonucleotide
  modified_base 12: mod_base = OTHER; note = 2-deoxy-2-fluoro ribonucleotide
  modified_base 14: mod_base = OTHER; note = 2-deoxy-2-fluoro ribonucleotide
  modified_base 16: mod_base = OTHER; note = 2-deoxy-2-fluoro ribonucleotide
  modified_base 18: mod_base = OTHER; note = 2-deoxy-2-fluoro ribonucleotide
  modified_base 20..21: mod_base = OTHER; note = phosphorothioate internucleotide linkage
  modified_base 1: mod_base = OTHER; note = Thymine
  modified_base 20..21: mod_base = OTHER; note = Thymine
tgtccgactatgctggtgttt

SEQ ID NO: 456 - RNA, 21 nt, synthetic construct
  source 1..21: mol_type = other RNA
  modified_base 1: mod_base = OTHER; note = 2'-deoxy nucleotide
  modified_base 20..21: mod_base = OTHER; note = 2'-deoxy nucleotide
  modified_base 3: mod_base = OTHER; note = 2'-OMe modified nucleotide
  modified_base 5: mod_base = OTHER; note = 2'-OMe modified nucleotide
  modified_base 7: mod_base = OTHER; note = 2'-OMe modified nucleotide
  modified_base 9: mod_base = OTHER; note = 2'-OMe modified nucleotide
  modified_base 11: mod_base = OTHER; note = 2'-OMe modified nucleotide
  modified_base 13: mod_base = OTHER; note = 2'-OMe modified nucleotide
  modified_base 15: mod_base = OTHER; note = 2'-OMe modified nucleotide
  modified_base 17: mod_base = OTHER; note = 2'-OMe modified nucleotide
  modified_base 19: mod_base = OTHER; note = 2'-OMe modified nucleotide
  modified_base 2: mod_base = OTHER; note = 2-deoxy-2-fluoro ribonucleotide
  modified_base 4: mod_base = OTHER; note = 2-deoxy-2-fluoro ribonucleotide
  modified_base 6: mod_base = OTHER; note = 2-deoxy-2-fluoro ribonucleotide
  modified_base 8: mod_base = OTHER; note = 2-deoxy-2-fluoro ribonucleotide
  modified_base 10: mod_base = OTHER; note = 2-deoxy-2-fluoro ribonucleotide
  modified_base 12: mod_base = OTHER; note = 2-deoxy-2-fluoro ribonucleotide
  modified_base 14: mod_base = OTHER; note = 2-deoxy-2-fluoro ribonucleotide
  modified_base 16: mod_base = OTHER; note = 2-deoxy-2-fluoro ribonucleotide
  modified_base 18: mod_base = OTHER; note = 2-deoxy-2-fluoro ribonucleotide
  modified_base 20..21: mod_base = OTHER; note = phosphorothioate internucleotide linkage
  modified_base 1: mod_base = OTHER; note = Thymine
  modified_base 20..21: mod_base = OTHER; note = Thymine
ttctcagcatctggattcctt

SEQ ID NO: 457 - RNA, 21 nt, synthetic construct
  source 1..21: mol_type = other RNA
  modified_base 1: mod_base = OTHER; note = 2'-deoxy nucleotide
  modified_base 20..21: mod_base = OTHER; note = 2'-deoxy nucleotide
  modified_base 3: mod_base = OTHER; note = 2'-OMe modified nucleotide
  modified_base 5: mod_base = OTHER; note = 2'-OMe modified nucleotide
  modified_base 7: mod_base = OTHER; note = 2'-OMe modified nucleotide
  modified_base 9: mod_base = OTHER; note = 2'-OMe modified nucleotide
  modified_base 11: mod_base = OTHER; note = 2'-OMe modified nucleotide
  modified_base 13: mod_base = OTHER; note = 2'-OMe modified nucleotide
  modified_base 15: mod_base = OTHER; note = 2'-OMe modified nucleotide
  modified_base 17: mod_base = OTHER; note = 2'-OMe modified nucleotide
  modified_base 19: mod_base = OTHER; note = 2'-OMe modified nucleotide
  modified_base 2: mod_base = OTHER; note = 2-deoxy-2-fluoro ribonucleotide
  modified_base 4: mod_base = OTHER; note = 2-deoxy-2-fluoro ribonucleotide
  modified_base 6: mod_base = OTHER; note = 2-deoxy-2-fluoro ribonucleotide
  modified_base 8: mod_base = OTHER; note = 2-deoxy-2-fluoro ribonucleotide
  modified_base 10: mod_base = OTHER; note = 2-deoxy-2-fluoro ribonucleotide
  modified_base 12: mod_base = OTHER; note = 2-deoxy-2-fluoro ribonucleotide
  modified_base 14: mod_base = OTHER; note = 2-deoxy-2-fluoro ribonucleotide
  modified_base 16: mod_base = OTHER; note = 2-deoxy-2-fluoro ribonucleotide
  modified_base 18: mod_base = OTHER; note = 2-deoxy-2-fluoro ribonucleotide
  modified_base 20..21: mod_base = OTHER; note = phosphorothioate internucleotide linkage
  modified_base 1: mod_base = OTHER; note = Thymine
  modified_base 20..21: mod_base = OTHER; note = Thymine
tcgaatctcagcatctggatt

SEQ ID NO: 458 - RNA, 21 nt, synthetic construct
  source 1..21: mol_type = other RNA
  modified_base 1: mod_base = OTHER; note = 2'-deoxy nucleotide
  modified_base 20..21: mod_base = OTHER; note = 2'-deoxy nucleotide
  modified_base 3: mod_base = OTHER; note = 2'-OMe modified nucleotide
  modified_base 5: mod_base = OTHER; note = 2'-OMe modified nucleotide
  modified_base 7: mod_base = OTHER; note = 2'-OMe modified nucleotide
  modified_base 9: mod_base = OTHER; note = 2'-OMe modified nucleotide
  modified_base 11: mod_base = OTHER; note = 2'-OMe modified nucleotide
  modified_base 13: mod_base = OTHER; note = 2'-OMe modified nucleotide
  modified_base 15: mod_base = OTHER; note = 2'-OMe modified nucleotide
  modified_base 17: mod_base = OTHER; note = 2'-OMe modified nucleotide
  modified_base 19: mod_base = OTHER; note = 2'-OMe modified nucleotide
  modified_base 2: mod_base = OTHER; note = 2-deoxy-2-fluoro ribonucleotide
  modified_base 4: mod_base = OTHER; note = 2-deoxy-2-fluoro ribonucleotide
  modified_base 6: mod_base = OTHER; note = 2-deoxy-2-fluoro ribonucleotide
  modified_base 8: mod_base = OTHER; note = 2-deoxy-2-fluoro ribonucleotide
  modified_base 10: mod_base = OTHER; note = 2-deoxy-2-fluoro ribonucleotide
  modified_base 12: mod_base = OTHER; note = 2-deoxy-2-fluoro ribonucleotide
  modified_base 14: mod_base = OTHER; note = 2-deoxy-2-fluoro ribonucleotide
  modified_base 16: mod_base = OTHER; note = 2-deoxy-2-fluoro ribonucleotide
  modified_base 18: mod_base = OTHER; note = 2-deoxy-2-fluoro ribonucleotide
  modified_base 20..21: mod_base = OTHER; note = phosphorothioate internucleotide linkage
  modified_base 1: mod_base = OTHER; note = Thymine
  modified_base 20..21: mod_base = OTHER; note = Thymine
taagggcgaatctcagcattt

SEQ ID NO: 459 - RNA, 21 nt, synthetic construct
  source 1..21: mol_type = other RNA
  modified_base 1: mod_base = OTHER; note = 2'-deoxy nucleotide
  modified_base 20..21: mod_base = OTHER; note = 2'-deoxy nucleotide
  modified_base 3: mod_base = OTHER; note = 2'-OMe modified nucleotide
  modified_base 5: mod_base = OTHER; note = 2'-OMe modified nucleotide
  modified_base 7: mod_base = OTHER; note = 2'-OMe modified nucleotide
  modified_base 9: mod_base = OTHER; note = 2'-OMe modified nucleotide
  modified_base 11: mod_base = OTHER; note = 2'-OMe modified nucleotide
  modified_base 13: mod_base = OTHER; note = 2'-OMe modified nucleotide
  modified_base 15: mod_base = OTHER; note = 2'-OMe modified nucleotide
  modified_base 17: mod_base = OTHER; note = 2'-OMe modified nucleotide
  modified_base 19: mod_base = OTHER; note = 2'-OMe modified nucleotide
  modified_base 2: mod_base = OTHER; note = 2-deoxy-2-fluoro ribonucleotide
  modified_base 4: mod_base = OTHER; note = 2-deoxy-2-fluoro ribonucleotide
  modified_base 6: mod_base = OTHER; note = 2-deoxy-2-fluoro ribonucleotide
  modified_base 8: mod_base = OTHER; note = 2-deoxy-2-fluoro ribonucleotide
  modified_base 10: mod_base = OTHER; note = 2-deoxy-2-fluoro ribonucleotide
  modified_base 12: mod_base = OTHER; note = 2-deoxy-2-fluoro ribonucleotide
  modified_base 14: mod_base = OTHER; note = 2-deoxy-2-fluoro ribonucleotide
  modified_base 16: mod_base = OTHER; note = 2-deoxy-2-fluoro ribonucleotide
  modified_base 18: mod_base = OTHER; note = 2-deoxy-2-fluoro ribonucleotide
  modified_base 20..21: mod_base = OTHER; note = phosphorothioate internucleotide linkage
  modified_base 1: mod_base = OTHER; note = Thymine
  modified_base 20..21: mod_base = OTHER; note = Thymine
ttgacactgggatccatggtt

SEQ ID NO: 460 - RNA, 21 nt, synthetic construct
  source 1..21: mol_type = other RNA
  modified_base 1: mod_base = OTHER; note = 2'-deoxy nucleotide
  modified_base 20..21: mod_base = OTHER; note = 2'-deoxy nucleotide
  modified_base 3: mod_base = OTHER; note = 2'-OMe modified nucleotide
  modified_base 5: mod_base = OTHER; note = 2'-OMe modified nucleotide
  modified_base 7: mod_base = OTHER; note = 2'-OMe modified nucleotide
  modified_base 9: mod_base = OTHER; note = 2'-OMe modified nucleotide
  modified_base 11: mod_base = OTHER; note = 2'-OMe modified nucleotide
  modified_base 13: mod_base = OTHER; note = 2'-OMe modified nucleotide
  modified_base 15: mod_base = OTHER; note = 2'-OMe modified nucleotide
  modified_base 17: mod_base = OTHER; note = 2'-OMe modified nucleotide
  modified_base 19: mod_base = OTHER; note = 2'-OMe modified nucleotide
  modified_base 2: mod_base = OTHER; note = 2-deoxy-2-fluoro ribonucleotide
  modified_base 4: mod_base = OTHER; note = 2-deoxy-2-fluoro ribonucleotide
  modified_base 6: mod_base = OTHER; note = 2-deoxy-2-fluoro ribonucleotide
  modified_base 8: mod_base = OTHER; note = 2-deoxy-2-fluoro ribonucleotide
  modified_base 10: mod_base = OTHER; note = 2-deoxy-2-fluoro ribonucleotide
  modified_base 12: mod_base = OTHER; note = 2-deoxy-2-fluoro ribonucleotide
  modified_base 14: mod_base = OTHER; note = 2-deoxy-2-fluoro ribonucleotide
  modified_base 16: mod_base = OTHER; note = 2-deoxy-2-fluoro ribonucleotide
  modified_base 18: mod_base = OTHER; note = 2-deoxy-2-fluoro ribonucleotide
  modified_base 20..21: mod_base = OTHER; note = phosphorothioate internucleotide linkage
  modified_base 1: mod_base = OTHER; note = Thymine
  modified_base 20..21: mod_base = OTHER; note = Thymine
tccgttggtgcttcttcagtt

SEQ ID NO: 461 - RNA, 21 nt, synthetic construct
  source 1..21: mol_type = other RNA
  modified_base 1: mod_base = OTHER; note = 2'-deoxy nucleotide
  modified_base 20..21: mod_base = OTHER; note = 2'-deoxy nucleotide
  modified_base 3: mod_base = OTHER; note = 2'-OMe modified nucleotide
  modified_base 5: mod_base = OTHER; note = 2'-OMe modified nucleotide
  modified_base 7: mod_base = OTHER; note = 2'-OMe modified nucleotide
  modified_base 9: mod_base = OTHER; note = 2'-OMe modified nucleotide
  modified_base 11: mod_base = OTHER; note = 2'-OMe modified nucleotide
  modified_base 13: mod_base = OTHER; note = 2'-OMe modified nucleotide
  modified_base 15: mod_base = OTHER; note = 2'-OMe modified nucleotide
  modified_base 17: mod_base = OTHER; note = 2'-OMe modified nucleotide
  modified_base 19: mod_base = OTHER; note = 2'-OMe modified nucleotide
  modified_base 2: mod_base = OTHER; note = 2-deoxy-2-fluoro ribonucleotide
  modified_base 4: mod_base = OTHER; note = 2-deoxy-2-fluoro ribonucleotide
  modified_base 6: mod_base = OTHER; note = 2-deoxy-2-fluoro ribonucleotide
  modified_base 8: mod_base = OTHER; note = 2-deoxy-2-fluoro ribonucleotide
  modified_base 10: mod_base = OTHER; note = 2-deoxy-2-fluoro ribonucleotide
  modified_base 12: mod_base = OTHER; note = 2-deoxy-2-fluoro ribonucleotide
  modified_base 14: mod_base = OTHER; note = 2-deoxy-2-fluoro ribonucleotide
  modified_base 16: mod_base = OTHER; note = 2-deoxy-2-fluoro ribonucleotide
  modified_base 18: mod_base = OTHER; note = 2-deoxy-2-fluoro ribonucleotide
  modified_base 20..21: mod_base = OTHER; note = phosphorothioate internucleotide linkage
  modified_base 1: mod_base = OTHER; note = Thymine
  modified_base 20..21: mod_base = OTHER; note = Thymine
tcttgattctgtcactggatt

SEQ ID NO: 462 - RNA, 21 nt, synthetic construct
  source 1..21: mol_type = other RNA
  modified_base 1: mod_base = OTHER; note = 2'-deoxy nucleotide
  modified_base 20..21: mod_base = OTHER; note = 2'-deoxy nucleotide
  modified_base 3: mod_base = OTHER; note = 2'-OMe modified nucleotide
  modified_base 5: mod_base = OTHER; note = 2'-OMe modified nucleotide
  modified_base 7: mod_base = OTHER; note = 2'-OMe modified nucleotide
  modified_base 9: mod_base = OTHER; note = 2'-OMe modified nucleotide
  modified_base 11: mod_base = OTHER; note = 2'-OMe modified nucleotide
  modified_base 13: mod_base = OTHER; note = 2'-OMe modified nucleotide
  modified_base 15: mod_base = OTHER; note = 2'-OMe modified nucleotide
  modified_base 17: mod_base = OTHER; note = 2'-OMe modified nucleotide
  modified_base 19: mod_base = OTHER; note = 2'-OMe modified nucleotide
  modified_base 2: mod_base = OTHER; note = 2-deoxy-2-fluoro ribonucleotide
  modified_base 4: mod_base = OTHER; note = 2-deoxy-2-fluoro ribonucleotide
  modified_base 6: mod_base = OTHER; note = 2-deoxy-2-fluoro ribonucleotide
  modified_base 8: mod_base = OTHER; note = 2-deoxy-2-fluoro ribonucleotide
  modified_base 10: mod_base = OTHER; note = 2-deoxy-2-fluoro ribonucleotide
  modified_base 12: mod_base = OTHER; note = 2-deoxy-2-fluoro ribonucleotide
  modified_base 14: mod_base = OTHER; note = 2-deoxy-2-fluoro ribonucleotide
  modified_base 16: mod_base = OTHER; note = 2-deoxy-2-fluoro ribonucleotide
  modified_base 18: mod_base = OTHER; note = 2-deoxy-2-fluoro ribonucleotide
  modified_base 20..21: mod_base = OTHER; note = phosphorothioate internucleotide linkage
  modified_base 1: mod_base = OTHER; note = Thymine
  modified_base 20..21: mod_base = OTHER; note = Thymine
tcaccgtgggagttgtgagtt

SEQ ID NO: 463 - RNA, 21 nt, synthetic construct
  source 1..21: mol_type = other RNA
  modified_base 1: mod_base = OTHER; note = 2'-deoxy nucleotide
  modified_base 20..21: mod_base = OTHER; note = 2'-deoxy nucleotide
  modified_base 3: mod_base = OTHER; note = 2'-OMe modified nucleotide
  modified_base 5: mod_base = OTHER; note = 2'-OMe modified nucleotide
  modified_base 7: mod_base = OTHER; note = 2'-OMe modified nucleotide
  modified_base 9: mod_base = OTHER; note = 2'-OMe modified nucleotide
  modified_base 11: mod_base = OTHER; note = 2'-OMe modified nucleotide
  modified_base 13: mod_base = OTHER; note = 2'-OMe modified nucleotide
  modified_base 15: mod_base = OTHER; note = 2'-OMe modified nucleotide
  modified_base 17: mod_base = OTHER; note = 2'-OMe modified nucleotide
  modified_base 19: mod_base = OTHER; note = 2'-OMe modified nucleotide
  modified_base 2: mod_base = OTHER; note = 2-deoxy-2-fluoro ribonucleotide
  modified_base 4: mod_base = OTHER; note = 2-deoxy-2-fluoro ribonucleotide
  modified_base 6: mod_base = OTHER; note = 2-deoxy-2-fluoro ribonucleotide
  modified_base 8: mod_base = OTHER; note = 2-deoxy-2-fluoro ribonucleotide
  modified_base 10: mod_base = OTHER; note = 2-deoxy-2-fluoro ribonucleotide
  modified_base 12: mod_base = OTHER; note = 2-deoxy-2-fluoro ribonucleotide
  modified_base 14: mod_base = OTHER; note = 2-deoxy-2-fluoro ribonucleotide
  modified_base 16: mod_base = OTHER; note = 2-deoxy-2-fluoro ribonucleotide
  modified_base 18: mod_base = OTHER; note = 2-deoxy-2-fluoro ribonucleotide
  modified_base 20..21: mod_base = OTHER; note = phosphorothioate internucleotide linkage
  modified_base 1: mod_base = OTHER; note = Thymine
  modified_base 20..21: mod_base = OTHER; note = Thymine
ttctaggacacctgattcttt

SEQ ID NO: 464 - RNA, 21 nt, synthetic construct
  source 1..21: mol_type = other RNA
  modified_base 1: mod_base = OTHER; note = 2'-deoxy nucleotide
  modified_base 20..21: mod_base = OTHER; note = 2'-deoxy nucleotide
  modified_base 3: mod_base = OTHER; note = 2'-OMe modified nucleotide
  modified_base 5: mod_base = OTHER; note = 2'-OMe modified nucleotide
  modified_base 7: mod_base = OTHER; note = 2'-OMe modified nucleotide
  modified_base 9: mod_base = OTHER; note = 2'-OMe modified nucleotide
  modified_base 11: mod_base = OTHER; note = 2'-OMe modified nucleotide
  modified_base 13: mod_base = OTHER; note = 2'-OMe modified nucleotide
  modified_base 15: mod_base = OTHER; note = 2'-OMe modified nucleotide
  modified_base 17: mod_base = OTHER; note = 2'-OMe modified nucleotide
  modified_base 19: mod_base = OTHER; note = 2'-OMe modified nucleotide
  modified_base 2: mod_base = OTHER; note = 2-deoxy-2-fluoro ribonucleotide
  modified_base 4: mod_base = OTHER; note = 2-deoxy-2-fluoro ribonucleotide
  modified_base 6: mod_base = OTHER; note = 2-deoxy-2-fluoro ribonucleotide
  modified_base 8: mod_base = OTHER; note = 2-deoxy-2-fluoro ribonucleotide
  modified_base 10: mod_base = OTHER; note = 2-deoxy-2-fluoro ribonucleotide
  modified_base 12: mod_base = OTHER; note = 2-deoxy-2-fluoro ribonucleotide
  modified_base 14: mod_base = OTHER; note = 2-deoxy-2-fluoro ribonucleotide
  modified_base 16: mod_base = OTHER; note = 2-deoxy-2-fluoro ribonucleotide
  modified_base 18: mod_base = OTHER; note = 2-deoxy-2-fluoro ribonucleotide
  modified_base 20..21: mod_base = OTHER; note = phosphorothioate internucleotide linkage
  modified_base 1: mod_base = OTHER; note = Thymine
  modified_base 20..21: mod_base = OTHER; note = Thymine
tagtctctaggacacctgatt

SEQ ID NO: 465 - RNA, 21 nt, synthetic construct
  source 1..21: mol_type = other RNA
  modified_base 1: mod_base = OTHER; note = 2'-deoxy nucleotide
  modified_base 20..21: mod_base = OTHER; note = 2'-deoxy nucleotide
  modified_base 3: mod_base = OTHER; note = 2'-OMe modified nucleotide
  modified_base 5: mod_base = OTHER; note = 2'-OMe modified nucleotide
  modified_base 7: mod_base = OTHER; note = 2'-OMe modified nucleotide
  modified_base 9: mod_base = OTHER; note = 2'-OMe modified nucleotide
  modified_base 11: mod_base = OTHER; note = 2'-OMe modified nucleotide
  modified_base 13: mod_base = OTHER; note = 2'-OMe modified nucleotide
  modified_base 15: mod_base = OTHER; note = 2'-OMe modified nucleotide
  modified_base 17: mod_base = OTHER; note = 2'-OMe modified nucleotide
  modified_base 19: mod_base = OTHER; note = 2'-OMe modified nucleotide
  modified_base 2: mod_base = OTHER; note = 2-deoxy-2-fluoro ribonucleotide
  modified_base 4: mod_base = OTHER; note = 2-deoxy-2-fluoro ribonucleotide
  modified_base 6: mod_base = OTHER; note = 2-deoxy-2-fluoro ribonucleotide
  modified_base 8: mod_base = OTHER; note = 2-deoxy-2-fluoro ribonucleotide
  modified_base 10: mod_base = OTHER; note = 2-deoxy-2-fluoro ribonucleotide
  modified_base 14: mod_base = OTHER; note = 2-deoxy-2-fluoro ribonucleotide
  modified_base 16: mod_base = OTHER; note = 2-deoxy-2-fluoro ribonucleotide
  modified_base 18: mod_base = OTHER; note = 2-deoxy-2-fluoro ribonucleotide
  modified_base 20..21: mod_base = OTHER; note = phosphorothioate internucleotide linkage
  modified_base 1: mod_base = OTHER; note = Thymine
  modified_base 20..21: mod_base = OTHER; note = Thymine
tgtataacaataaggggcttt

SEQ ID NO: 466 - RNA, 21 nt, synthetic construct
  source 1..21: mol_type = other RNA
  modified_base 1: mod_base = OTHER; note = 2'-deoxy nucleotide
  modified_base 20..21: mod_base = OTHER; note = 2'-deoxy nucleotide
  modified_base 6: mod_base = OTHER; note = 2',3'-seco nucleotide mimics
  modified_base 3: mod_base = OTHER; note = 2'-OMe modified nucleotide
  modified_base 5: mod_base = OTHER; note = 2'-OMe modified nucleotide
  modified_base 7: mod_base = OTHER; note = 2'-OMe modified nucleotide
  modified_base 9: mod_base = OTHER; note = 2'-OMe modified nucleotide
  modified_base 11: mod_base = OTHER; note = 2'-OMe modified nucleotide
  modified_base 12: mod_base = OTHER; note = 2'-OMe modified nucleotide
  modified_base 13: mod_base = OTHER; note = 2'-OMe modified nucleotide
  modified_base 15: mod_base = OTHER; note = 2'-OMe modified nucleotide
  modified_base 17: mod_base = OTHER; note = 2'-OMe modified nucleotide
  modified_base 19: mod_base = OTHER; note = 2'-OMe modified nucleotide
  modified_base 2: mod_base = OTHER; note = 2-deoxy-2-fluoro ribonucleotide
  modified_base 4: mod_base = OTHER; note = 2-deoxy-2-fluoro ribonucleotide
  modified_base 8: mod_base = OTHER; note = 2-deoxy-2-fluoro ribonucleotide
  modified_base 10: mod_base = OTHER; note = 2-deoxy-2-fluoro ribonucleotide
  modified_base 14: mod_base = OTHER; note = 2-deoxy-2-fluoro ribonucleotide
  modified_base 16: mod_base = OTHER; note = 2-deoxy-2-fluoro ribonucleotide
  modified_base 18: mod_base = OTHER; note = 2-deoxy-2-fluoro ribonucleotide
  modified_base 20..21: mod_base = OTHER; note = phosphorothioate internucleotide linkage
  modified_base 1: mod_base = OTHER; note = Thymine
  modified_base 20..21: mod_base = OTHER; note = Thymine
tgtataacaataaggggcttt

SEQ ID NO: 467 - RNA, 21 nt, synthetic construct
  source 1..21: mol_type = other RNA
  modified_base 1: mod_base = OTHER; note = 2'-deoxy nucleotide
  modified_base 20..21: mod_base = OTHER; note = 2'-deoxy nucleotide
  modified_base 7: mod_base = OTHER; note = 2',3'-seco nucleotide mimics
  modified_base 3: mod_base = OTHER; note = 2'-OMe modified nucleotide
  modified_base 5: mod_base = OTHER; note = 2'-OMe modified nucleotide
  modified_base 9: mod_base = OTHER; note = 2'-OMe modified nucleotide
  modified_base 11..13: mod_base = OTHER; note = 2'-OMe modified nucleotide
  modified_base 15: mod_base = OTHER; note = 2'-OMe modified nucleotide
  modified_base 17: mod_base = OTHER; note = 2'-OMe modified nucleotide
  modified_base 19: mod_base = OTHER; note = 2'-OMe modified nucleotide
  modified_base 2: mod_base = OTHER; note = 2-deoxy-2-fluoro ribonucleotide
  modified_base 4: mod_base = OTHER; note = 2-deoxy-2-fluoro ribonucleotide
  modified_base 6: mod_base = OTHER; note = 2-deoxy-2-fluoro ribonucleotide
  modified_base 8: mod_base = OTHER; note = 2-deoxy-2-fluoro ribonucleotide
  modified_base 10: mod_base = OTHER; note = 2-deoxy-2-fluoro ribonucleotide
  modified_base 14: mod_base = OTHER; note = 2-deoxy-2-fluoro ribonucleotide
  modified_base 16: mod_base = OTHER; note = 2-deoxy-2-fluoro ribonucleotide
  modified_base 18: mod_base = OTHER; note = 2-deoxy-2-fluoro ribonucleotide
  modified_base 20..21: mod_base = OTHER; note = phosphorothioate internucleotide linkage
  modified_base 1: mod_base = OTHER; note = Thymine
  modified_base 20..21: mod_base = OTHER; note = Thymine
tgtataacaataaggggcttt

SEQ ID NO: 468 - RNA, 21 nt, synthetic construct
  source 1..21: mol_type = other RNA
  modified_base 1: mod_base = OTHER; note = 2'-deoxy nucleotide
  modified_base 20..21: mod_base = OTHER; note = 2'-deoxy nucleotide
  modified_base 3: mod_base = OTHER; note = 2'-OMe modified nucleotide
  modified_base 5: mod_base = OTHER; note = 2'-OMe modified nucleotide
  modified_base 7: mod_base = OTHER; note = 2'-OMe modified nucleotide
  modified_base 9: mod_base = OTHER; note = 2'-OMe modified nucleotide
  modified_base 11: mod_base = OTHER; note = 2'-OMe modified nucleotide
  modified_base 12: mod_base = OTHER; note = 2'-OMe modified nucleotide
  modified_base 13: mod_base = OTHER; note = 2'-OMe modified nucleotide
  modified_base 15: mod_base = OTHER; note = 2'-OMe modified nucleotide
  modified_base 17: mod_base = OTHER; note = 2'-OMe modified nucleotide
  modified_base 19: mod_base = OTHER; note = 2'-OMe modified nucleotide
  modified_base 2: mod_base = OTHER; note = 2-deoxy-2-fluoro ribonucleotide
  modified_base 4: mod_base = OTHER; note = 2-deoxy-2-fluoro ribonucleotide
  modified_base 6: mod_base = OTHER; note = 2-deoxy-2-fluoro ribonucleotide
  modified_base 8: mod_base = OTHER; note = 2-deoxy-2-fluoro ribonucleotide
  modified_base 10: mod_base = OTHER; note = 2-deoxy-2-fluoro ribonucleotide
  modified_base 14: mod_base = OTHER; note = 2-deoxy-2-fluoro ribonucleotide
  modified_base 16: mod_base = OTHER; note = 2-deoxy-2-fluoro ribonucleotide
  modified_base 18: mod_base = OTHER; note = 2-deoxy-2-fluoro ribonucleotide
  modified_base 20..21: mod_base = OTHER; note = phosphorothioate internucleotide linkage
  modified_base 1: mod_base = OTHER; note = Thymine
  modified_base 20..21: mod_base = OTHER; note = Thymine
tcgtataacaataaggggctt

SEQ ID NO: 469 - RNA, 21 nt, synthetic construct
  source 1..21: mol_type = other RNA
  modified_base 1: mod_base = OTHER; note = 2'-deoxy nucleotide
  modified_base 20..21: mod_base = OTHER; note = 2'-deoxy nucleotide
  modified_base 6: mod_base = OTHER; note = 2',3'-seco nucleotide mimics
  modified_base 3: mod_base = OTHER; note = 2'-OMe modified nucleotide
  modified_base 5: mod_base = OTHER; note = 2'-OMe modified nucleotide
  modified_base 7: mod_base = OTHER; note = 2'-OMe modified nucleotide
  modified_base 9: mod_base = OTHER; note = 2'-OMe modified nucleotide
  modified_base 11: mod_base = OTHER; note = 2'-OMe modified nucleotide
  modified_base 12: mod_base = OTHER; note = 2'-OMe modified nucleotide
  modified_base 13: mod_base = OTHER; note = 2'-OMe modified nucleotide
  modified_base 15: mod_base = OTHER; note = 2'-OMe modified nucleotide
  modified_base 17: mod_base = OTHER; note = 2'-OMe modified nucleotide
  modified_base 19: mod_base = OTHER; note = 2'-OMe modified nucleotide
  modified_base 2: mod_base = OTHER; note = 2-deoxy-2-fluoro ribonucleotide
  modified_base 4: mod_base = OTHER; note = 2-deoxy-2-fluoro ribonucleotide
  modified_base 8: mod_base = OTHER; note = 2-deoxy-2-fluoro ribonucleotide
  modified_base 10: mod_base = OTHER; note = 2-deoxy-2-fluoro ribonucleotide
  modified_base 14: mod_base = OTHER; note = 2-deoxy-2-fluoro ribonucleotide
  modified_base 16: mod_base = OTHER; note = 2-deoxy-2-fluoro ribonucleotide
  modified_base 18: mod_base = OTHER; note = 2-deoxy-2-fluoro ribonucleotide
  modified_base 20..21: mod_base = OTHER; note = phosphorothioate internucleotide linkage
  modified_base 1: mod_base = OTHER; note = Thymine
  modified_base 20..21: mod_base = OTHER; note = Thymine
tcgtataacaataaggggctt

SEQ ID NO: 470 - RNA, 21 nt, synthetic construct
  source 1..21: mol_type = other RNA
  modified_base 1: mod_base = OTHER; note = 2'-deoxy nucleotide
  modified_base 20..21: mod_base = OTHER; note = 2'-deoxy nucleotide
  modified_base 7: mod_base = OTHER; note = 2',3'-seco nucleotide mimics
  modified_base 3: mod_base = OTHER; note = 2'-OMe modified nucleotide
  modified_base 5: mod_base = OTHER; note = 2'-OMe modified nucleotide
  modified_base 9: mod_base = OTHER; note = 2'-OMe modified nucleotide
  modified_base 11: mod_base = OTHER; note = 2'-OMe modified nucleotide
  modified_base 12: mod_base = OTHER; note = 2'-OMe modified nucleotide
  modified_base 13: mod_base = OTHER; note = 2'-OMe modified nucleotide
  modified_base 15: mod_base = OTHER; note = 2'-OMe modified nucleotide
  modified_base 17: mod_base = OTHER; note = 2'-OMe modified nucleotide
  modified_base 19: mod_base = OTHER; note = 2'-OMe modified nucleotide
  modified_base 2: mod_base = OTHER; note = 2-deoxy-2-fluoro ribonucleotide
  modified_base 4: mod_base = OTHER; note = 2-deoxy-2-fluoro ribonucleotide
  modified_base 6: mod_base = OTHER; note = 2-deoxy-2-fluoro ribonucleotide
  modified_base 8: mod_base = OTHER; note = 2-deoxy-2-fluoro ribonucleotide
  modified_base 10: mod_base = OTHER; note = 2-deoxy-2-fluoro ribonucleotide
  modified_base 14: mod_base = OTHER; note = 2-deoxy-2-fluoro ribonucleotide
  modified_base 16: mod_base = OTHER; note = 2-deoxy-2-fluoro ribonucleotide
  modified_base 18: mod_base = OTHER; note = 2-deoxy-2-fluoro ribonucleotide
  modified_base 20..21: mod_base = OTHER; note = phosphorothioate internucleotide linkage
  modified_base 1: mod_base = OTHER; note = Thymine
  modified_base 20..21: mod_base = OTHER; note = Thymine
tcgtataacaataaggggctt

SEQ ID NO: 471 - RNA, 21 nt, synthetic construct
  source 1..21: mol_type = other RNA
  modified_base 1: mod_base = OTHER; note = 2'-deoxy nucleotide
  modified_base 20..21: mod_base = OTHER; note = 2'-deoxy nucleotide
  modified_base 3: mod_base = OTHER; note = 2'-OMe modified nucleotide
  modified_base 5: mod_base = OTHER; note = 2'-OMe modified nucleotide
  modified_base 7: mod_base = OTHER; note = 2'-OMe modified nucleotide
  modified_base 9: mod_base = OTHER; note = 2'-OMe modified nucleotide
  modified_base 11: mod_base = OTHER; note = 2'-OMe modified nucleotide
  modified_base 12: mod_base = OTHER; note = 2'-OMe modified nucleotide
  modified_base 13: mod_base = OTHER; note = 2'-OMe modified nucleotide
  modified_base 15: mod_base = OTHER; note = 2'-OMe modified nucleotide
  modified_base 17: mod_base = OTHER; note = 2'-OMe modified nucleotide
  modified_base 19: mod_base = OTHER; note = 2'-OMe modified nucleotide
  modified_base 2: mod_base = OTHER; note = 2-deoxy-2-fluoro ribonucleotide
  modified_base 4: mod_base = OTHER; note = 2-deoxy-2-fluoro ribonucleotide
  modified_base 6: mod_base = OTHER; note = 2-deoxy-2-fluoro ribonucleotide
  modified_base 8: mod_base = OTHER; note = 2-deoxy-2-fluoro ribonucleotide
  modified_base 10: mod_base = OTHER; note = 2-deoxy-2-fluoro ribonucleotide
  modified_base 14: mod_base = OTHER; note = 2-deoxy-2-fluoro ribonucleotide
  modified_base 16: mod_base = OTHER; note = 2-deoxy-2-fluoro ribonucleotide
  modified_base 18: mod_base = OTHER; note = 2-deoxy-2-fluoro ribonucleotide
  modified_base 20..21: mod_base = OTHER; note = phosphorothioate internucleotide linkage
  modified_base 1: mod_base = OTHER; note = Thymine
  modified_base 20..21: mod_base = OTHER; note = Thymine
tgcgtctgagcattgtgtctt

SEQ ID NO: 472 - RNA, 21 nt, synthetic construct
  source 1..21: mol_type = other RNA
  modified_base 1: mod_base = OTHER; note = 2'-deoxy nucleotide
  modified_base 20..21: mod_base = OTHER; note = 2'-deoxy nucleotide
  modified_base 6: mod_base = OTHER; note = 2',3'-seco nucleotide mimics
  modified_base 3: mod_base = OTHER; note = 2'-OMe modified nucleotide
  modified_base 5: mod_base = OTHER; note = 2'-OMe modified nucleotide
  modified_base 7: mod_base = OTHER; note = 2'-OMe modified nucleotide
  modified_base 9: mod_base = OTHER; note = 2'-OMe modified nucleotide
  modified_base 11: mod_base = OTHER; note = 2'-OMe modified nucleotide
  modified_base 12: mod_base = OTHER; note = 2'-OMe modified nucleotide
  modified_base 13: mod_base = OTHER; note = 2'-OMe modified nucleotide
  modified_base 15: mod_base = OTHER; note = 2'-OMe modified nucleotide
  modified_base 17: mod_base = OTHER; note = 2'-OMe modified nucleotide
  modified_base 19: mod_base = OTHER; note = 2'-OMe modified nucleotide
  modified_base 2: mod_base = OTHER; note = 2-deoxy-2-fluoro ribonucleotide
  modified_base 4: mod_base = OTHER; note = 2-deoxy-2-fluoro ribonucleotide
  modified_base 8: mod_base = OTHER; note = 2-deoxy-2-fluoro ribonucleotide
  modified_base 10: mod_base = OTHER; note = 2-deoxy-2-fluoro ribonucleotide
  modified_base 14: mod_base = OTHER; note = 2-deoxy-2-fluoro ribonucleotide
  modified_base 16: mod_base = OTHER; note = 2-deoxy-2-fluoro ribonucleotide
  modified_base 18: mod_base = OTHER; note = 2-deoxy-2-fluoro ribonucleotide
  modified_base 20..21: mod_base = OTHER; note = phosphorothioate internucleotide linkage
  modified_base 1: mod_base = OTHER; note = Thymine
  modified_base 20..21: mod_base = OTHER; note = Thymine
tgcgtctgagcattgtgtctt

SEQ ID NO: 473 - RNA, 21 nt, synthetic construct
  source 1..21: mol_type = other RNA
  modified_base 1: mod_base = OTHER; note = 2'-deoxy nucleotide
  modified_base 20..21: mod_base = OTHER; note = 2'-deoxy nucleotide
  modified_base 7: mod_base = OTHER; note = 2',3'-seco nucleotide mimics
  modified_base 3: mod_base = OTHER; note = 2'-OMe modified nucleotide
  modified_base 5: mod_base = OTHER; note = 2'-OMe modified nucleotide
  modified_base 9: mod_base = OTHER; note = 2'-OMe modified nucleotide
  modified_base 11: mod_base = OTHER; note = 2'-OMe modified nucleotide
  modified_base 12: mod_base = OTHER; note = 2'-OMe modified nucleotide
  modified_base 13: mod_base = OTHER; note = 2'-OMe modified nucleotide
  modified_base 15: mod_base = OTHER; note = 2'-OMe modified nucleotide
  modified_base 17: mod_base = OTHER; note = 2'-OMe modified nucleotide
  modified_base 19: mod_base = OTHER; note = 2'-OMe modified nucleotide
  modified_base 2: mod_base = OTHER; note = 2-deoxy-2-fluoro ribonucleotide
  modified_base 4: mod_base = OTHER; note = 2-deoxy-2-fluoro ribonucleotide
  modified_base 6: mod_base = OTHER; note = 2-deoxy-2-fluoro ribonucleotide
  modified_base 8: mod_base = OTHER; note = 2-deoxy-2-fluoro ribonucleotide
  modified_base 10: mod_base = OTHER; note = 2-deoxy-2-fluoro ribonucleotide
  modified_base 14: mod_base = OTHER; note = 2-deoxy-2-fluoro ribonucleotide
  modified_base 16: mod_base = OTHER; note = 2-deoxy-2-fluoro ribonucleotide
  modified_base 18: mod_base = OTHER; note = 2-deoxy-2-fluoro ribonucleotide
  modified_base 20..21: mod_base = OTHER; note = phosphorothioate internucleotide linkage
  modified_base 1: mod_base = OTHER; note = Thymine
  modified_base 20..21: mod_base = OTHER; note = Thymine
tgcgtctgagcattgtgtctt

SEQ ID NO: 474 - RNA, 21 nt, synthetic construct
  source 1..21: mol_type = other RNA
  modified_base 1: mod_base = OTHER; note = 2'-deoxy nucleotide
  modified_base 20..21: mod_base = OTHER; note = 2'-deoxy nucleotide
  modified_base 3: mod_base = OTHER; note = 2'-OMe modified nucleotide
  modified_base 5: mod_base = OTHER; note = 2'-OMe modified nucleotide
  modified_base 7: mod_base = OTHER; note = 2'-OMe modified nucleotide
  modified_base 9: mod_base = OTHER; note = 2'-OMe modified nucleotide
  modified_base 11: mod_base = OTHER; note = 2'-OMe modified nucleotide
  modified_base 12: mod_base = OTHER; note = 2'-OMe modified nucleotide
  modified_base 13: mod_base = OTHER; note = 2'-OMe modified nucleotide
  modified_base 15: mod_base = OTHER; note = 2'-OMe modified nucleotide
  modified_base 17: mod_base = OTHER; note = 2'-OMe modified nucleotide
  modified_base 19: mod_base = OTHER; note = 2'-OMe modified nucleotide
  modified_base 2: mod_base = OTHER; note = 2-deoxy-2-fluoro ribonucleotide
  modified_base 4: mod_base = OTHER; note = 2-deoxy-2-fluoro ribonucleotide
  modified_base 6: mod_base = OTHER; note = 2-deoxy-2-fluoro ribonucleotide
  modified_base 8: mod_base = OTHER; note = 2-deoxy-2-fluoro ribonucleotide
  modified_base 10: mod_base = OTHER; note = 2-deoxy-2-fluoro ribonucleotide
  modified_base 14: mod_base = OTHER; note = 2-deoxy-2-fluoro ribonucleotide
  modified_base 16: mod_base = OTHER; note = 2-deoxy-2-fluoro ribonucleotide
  modified_base 18: mod_base = OTHER; note = 2-deoxy-2-fluoro ribonucleotide
  modified_base 20..21: mod_base = OTHER; note = phosphorothioate internucleotide linkage
  modified_base 1: mod_base = OTHER; note = Thymine
  modified_base 20..21: mod_base = OTHER; note = Thymine
ttgcgtctgagcattgtgttt

SEQ ID NO: 475 - RNA, 21 nt, synthetic construct
  source 1..21: mol_type = other RNA
  modified_base 1: mod_base = OTHER; note = 2'-deoxy nucleotide
  modified_base 20..21: mod_base = OTHER; note = 2'-deoxy nucleotide
  modified_base 6: mod_base = OTHER; note = 2',3'-seco nucleotide mimics
  modified_base 3: mod_base = OTHER; note = 2'-OMe modified nucleotide
  modified_base 5: mod_base = OTHER; note = 2'-OMe modified nucleotide
  modified_base 7: mod_base = OTHER; note = 2'-OMe modified nucleotide
  modified_base 9: mod_base = OTHER; note = 2'-OMe modified nucleotide
  modified_base 11: mod_base = OTHER; note = 2'-OMe modified nucleotide
  modified_base 12: mod_base = OTHER; note = 2'-OMe modified nucleotide
  modified_base 13: mod_base = OTHER; note = 2'-OMe modified nucleotide
  modified_base 15: mod_base = OTHER; note = 2'-OMe modified nucleotide
  modified_base 17: mod_base = OTHER; note = 2'-OMe modified nucleotide
  modified_base 19: mod_base = OTHER; note = 2'-OMe modified nucleotide
  modified_base 2: mod_base = OTHER; note = 2-deoxy-2-fluoro ribonucleotide
  modified_base 4: mod_base = OTHER; note = 2-deoxy-2-fluoro ribonucleotide
  modified_base 8: mod_base = OTHER; note = 2-deoxy-2-fluoro ribonucleotide
  modified_base 10: mod_base = OTHER; note = 2-deoxy-2-fluoro ribonucleotide
  modified_base 14: mod_base = OTHER; note = 2-deoxy-2-fluoro ribonucleotide
  modified_base 16: mod_base = OTHER; note = 2-deoxy-2-fluoro ribonucleotide
  modified_base 18: mod_base = OTHER; note = 2-deoxy-2-fluoro ribonucleotide
  modified_base 20..21: mod_base = OTHER; note = phosphorothioate internucleotide linkage
  modified_base 1: mod_base = OTHER; note = Thymine
  modified_base 20..21: mod_base = OTHER; note = Thymine
ttgcgtctgagcattgtgttt

SEQ ID NO: 476 - RNA, 21 nt, synthetic construct
  source 1..21: mol_type = other RNA
  modified_base 1: mod_base = OTHER; note = 2'-deoxy nucleotide
  modified_base 20..21: mod_base = OTHER; note = 2'-deoxy nucleotide
  modified_base 7: mod_base = OTHER; note = 2',3'-seco nucleotide mimics
  modified_base 3: mod_base = OTHER; note = 2'-OMe modified nucleotide
  modified_base 5: mod_base = OTHER; note = 2'-OMe modified nucleotide
  modified_base 9: mod_base = OTHER; note = 2'-OMe modified nucleotide
  modified_base 11: mod_base = OTHER; note = 2'-OMe modified nucleotide
  modified_base 12: mod_base = OTHER; note = 2'-OMe modified nucleotide
  modified_base 13: mod_base = OTHER; note = 2'-OMe modified nucleotide
  modified_base 15: mod_base = OTHER; note = 2'-OMe modified nucleotide
  modified_base 17: mod_base = OTHER; note = 2'-OMe modified nucleotide
  modified_base 19: mod_base = OTHER; note = 2'-OMe modified nucleotide
  modified_base 2: mod_base = OTHER; note = 2-deoxy-2-fluoro ribonucleotide
  modified_base 4: mod_base = OTHER; note = 2-deoxy-2-fluoro ribonucleotide
  modified_base 6: mod_base = OTHER; note = 2-deoxy-2-fluoro ribonucleotide
  modified_base 8: mod_base = OTHER; note = 2-deoxy-2-fluoro ribonucleotide
  modified_base 10: mod_base = OTHER; note = 2-deoxy-2-fluoro ribonucleotide
  modified_base 14: mod_base = OTHER; note = 2-deoxy-2-fluoro ribonucleotide
  modified_base 16: mod_base = OTHER; note = 2-deoxy-2-fluoro ribonucleotide
  modified_base 18: mod_base = OTHER; note = 2-deoxy-2-fluoro ribonucleotide
  modified_base 20..21: mod_base = OTHER; note = phosphorothioate internucleotide linkage
  modified_base 1: mod_base = OTHER; note = Thymine
  modified_base 20..21: mod_base = OTHER; note = Thymine
ttgcgtctgagcattgtgttt

SEQ ID NO: 477 - RNA, 21 nt, synthetic construct
  source 1..21: mol_type = other RNA
  modified_base 1: mod_base = OTHER; note = 2'-deoxy nucleotide
  modified_base 20..21: mod_base = OTHER; note = 2'-deoxy nucleotide
  modified_base 3: mod_base = OTHER; note = 2'-OMe modified nucleotide
  modified_base 5: mod_base = OTHER; note = 2'-OMe modified nucleotide
  modified_base 7: mod_base = OTHER; note = 2'-OMe modified nucleotide
  modified_base 9: mod_base = OTHER; note = 2'-OMe modified nucleotide
  modified_base 11: mod_base = OTHER; note = 2'-OMe modified nucleotide
  modified_base 12: mod_base = OTHER; note = 2'-OMe modified nucleotide
  modified_base 13: mod_base = OTHER; note = 2'-OMe modified nucleotide
  modified_base 15: mod_base = OTHER; note = 2'-OMe modified nucleotide
  modified_base 17: mod_base = OTHER; note = 2'-OMe modified nucleotide
  modified_base 19: mod_base = OTHER; note = 2'-OMe modified nucleotide
  modified_base 2: mod_base = OTHER; note = 2-deoxy-2-fluoro ribonucleotide
  modified_base 4: mod_base = OTHER; note = 2-deoxy-2-fluoro ribonucleotide
  modified_base 6: mod_base = OTHER; note = 2-deoxy-2-fluoro ribonucleotide
  modified_base 8: mod_base = OTHER; note = 2-deoxy-2-fluoro ribonucleotide
  modified_base 10: mod_base = OTHER; note = 2-deoxy-2-fluoro ribonucleotide
  modified_base 14: mod_base = OTHER; note = 2-deoxy-2-fluoro ribonucleotide
  modified_base 16: mod_base = OTHER; note = 2-deoxy-2-fluoro ribonucleotide
  modified_base 18: mod_base = OTHER; note = 2-deoxy-2-fluoro ribonucleotide
  modified_base 20..21: mod_base = OTHER; note = phosphorothioate internucleotide linkage
  modified_base 1: mod_base = OTHER; note = Thymine
  modified_base 20..21: mod_base = OTHER; note = Thymine
tgagaatgagcctcgataatt

SEQ ID NO: 478 - RNA, 21 nt, synthetic construct
  source 1..21: mol_type = other RNA
  modified_base 1: mod_base = OTHER; note = 2'-deoxy nucleotide
  modified_base 20..21: mod_base = OTHER; note = 2'-deoxy nucleotide
  modified_base 6: mod_base = OTHER; note = 2',3'-seco nucleotide mimics
  modified_base 3: mod_base = OTHER; note = 2'-OMe modified nucleotide
  modified_base 5: mod_base = OTHER; note = 2'-OMe modified nucleotide
  modified_base 7: mod_base = OTHER; note = 2'-OMe modified nucleotide
  modified_base 9: mod_base = OTHER; note = 2'-OMe modified nucleotide
  modified_base 11: mod_base = OTHER; note = 2'-OMe modified nucleotide
  modified_base 12: mod_base = OTHER; note = 2'-OMe modified nucleotide
  modified_base 13: mod_base = OTHER; note = 2'-OMe modified nucleotide
  modified_base 15: mod_base = OTHER; note = 2'-OMe modified nucleotide
  modified_base 17: mod_base = OTHER; note = 2'-OMe modified nucleotide
  modified_base 19: mod_base = OTHER; note = 2'-OMe modified nucleotide
  modified_base 2: mod_base = OTHER; note = 2-deoxy-2-fluoro ribonucleotide
  modified_base 4: mod_base = OTHER; note = 2-deoxy-2-fluoro ribonucleotide
  modified_base 8: mod_base = OTHER; note = 2-deoxy-2-fluoro ribonucleotide
  modified_base 10: mod_base = OTHER; note = 2-deoxy-2-fluoro ribonucleotide
  modified_base 14: mod_base = OTHER; note = 2-deoxy-2-fluoro ribonucleotide
  modified_base 16: mod_base = OTHER; note = 2-deoxy-2-fluoro ribonucleotide
  modified_base 18: mod_base = OTHER; note = 2-deoxy-2-fluoro ribonucleotide
  modified_base 20..21: mod_base = OTHER; note = phosphorothioate internucleotide linkage
  modified_base 1: mod_base = OTHER; note = Thymine
  modified_base 20..21: mod_base = OTHER; note = Thymine
tgagaatgagcctcgataatt

SEQ ID NO: 479 - RNA, 21 nt, synthetic construct
  source 1..21: mol_type = other RNA
  modified_base 1: mod_base = OTHER; note = 2'-deoxy nucleotide
  modified_base 20..21: mod_base = OTHER; note = 2'-deoxy nucleotide
  modified_base 7: mod_base = OTHER; note = 2',3'-seco nucleotide mimics
  modified_base 3: mod_base = OTHER; note = 2'-OMe modified nucleotide
  modified_base 5: mod_base = OTHER; note = 2'-OMe modified nucleotide
  modified_base 9: mod_base = OTHER; note = 2'-OMe modified nucleotide
  modified_base 11: mod_base = OTHER; note = 2'-OMe modified nucleotide
  modified_base 12: mod_base = OTHER; note = 2'-OMe modified nucleotide
  modified_base 13: mod_base = OTHER; note = 2'-OMe modified nucleotide
  modified_base 15: mod_base = OTHER; note = 2'-OMe modified nucleotide
  modified_base 17: mod_base = OTHER; note = 2'-OMe modified nucleotide
  modified_base 19: mod_base = OTHER; note = 2'-OMe modified nucleotide
  modified_base 2: mod_base = OTHER; note = 2-deoxy-2-fluoro ribonucleotide
  modified_base 4: mod_base = OTHER; note = 2-deoxy-2-fluoro ribonucleotide
  modified_base 6: mod_base = OTHER; note = 2-deoxy-2-fluoro ribonucleotide
  modified_base 8: mod_base = OTHER; note = 2-deoxy-2-fluoro ribonucleotide
  modified_base 10: mod_base = OTHER; note = 2-deoxy-2-fluoro ribonucleotide
  modified_base 14: mod_base = OTHER; note = 2-deoxy-2-fluoro ribonucleotide
  modified_base 16: mod_base = OTHER; note = 2-deoxy-2-fluoro ribonucleotide
  modified_base 18: mod_base = OTHER; note = 2-deoxy-2-fluoro ribonucleotide
  modified_base 20..21: mod_base = OTHER; note = phosphorothioate internucleotide linkage
  modified_base 1: mod_base = OTHER; note = Thymine
  modified_base 20..21: mod_base = OTHER; note = Thymine
tgagaatgagcctcgataatt

SEQ ID NO: 480 - RNA, 21 nt, synthetic construct
  source 1..21: mol_type = other RNA
  modified_base 1: mod_base = OTHER; note = 2'-deoxy nucleotide
  modified_base 20..21: mod_base = OTHER; note = 2'-deoxy nucleotide
  modified_base 3: mod_base = OTHER; note = 2'-OMe modified nucleotide
  modified_base 5: mod_base = OTHER; note = 2'-OMe modified nucleotide
  modified_base 7: mod_base = OTHER; note = 2'-OMe modified nucleotide
  modified_base 9: mod_base = OTHER; note = 2'-OMe modified nucleotide
  modified_base 11: mod_base = OTHER; note = 2'-OMe modified nucleotide
  modified_base 12: mod_base = OTHER; note = 2'-OMe modified nucleotide
  modified_base 13: mod_base = OTHER; note = 2'-OMe modified nucleotide
  modified_base 15: mod_base = OTHER; note = 2'-OMe modified nucleotide
  modified_base 17: mod_base = OTHER; note = 2'-OMe modified nucleotide
  modified_base 19: mod_base = OTHER; note = 2'-OMe modified nucleotide
  modified_base 2: mod_base = OTHER; note = 2-deoxy-2-fluoro ribonucleotide
  modified_base 4: mod_base = OTHER; note = 2-deoxy-2-fluoro ribonucleotide
  modified_base 6: mod_base = OTHER; note = 2-deoxy-2-fluoro ribonucleotide
  modified_base 8: mod_base = OTHER; note = 2-deoxy-2-fluoro ribonucleotide
  modified_base 10: mod_base = OTHER; note = 2-deoxy-2-fluoro ribonucleotide
  modified_base 14: mod_base = OTHER; note = 2-deoxy-2-fluoro ribonucleotide
  modified_base 16: mod_base = OTHER; note = 2-deoxy-2-fluoro ribonucleotide
  modified_base 18: mod_base = OTHER; note = 2-deoxy-2-fluoro ribonucleotide
  modified_base 20..21: mod_base = OTHER; note = phosphorothioate internucleotide linkage
  modified_base 1: mod_base = OTHER; note = Thymine
  modified_base 20..21: mod_base = OTHER; note = Thymine
tgacacctgattctgtttctt

SEQ ID NO: 481 - RNA, 21 nt, synthetic construct
  source 1..21: mol_type = other RNA
  modified_base 1: mod_base = OTHER; note = 2'-deoxy nucleotide
  modified_base 20..21: mod_base = OTHER; note = 2'-deoxy nucleotide
  modified_base 6: mod_base = OTHER; note = 2',3'-seco nucleotide mimics
  modified_base 3: mod_base = OTHER; note = 2'-OMe modified nucleotide
  modified_base 5: mod_base = OTHER; note = 2'-OMe modified nucleotide
  modified_base 7: mod_base = OTHER; note = 2'-OMe modified nucleotide
  modified_base 9: mod_base = OTHER; note = 2'-OMe modified nucleotide
  modified_base 11: mod_base = OTHER; note = 2'-OMe modified nucleotide
  modified_base 12: mod_base = OTHER; note = 2'-OMe modified nucleotide
  modified_base 13: mod_base = OTHER; note = 2'-OMe modified nucleotide
  modified_base 15: mod_base = OTHER; note = 2'-OMe modified nucleotide
  modified_base 17: mod_base = OTHER; note = 2'-OMe modified nucleotide
  modified_base 19: mod_base = OTHER; note = 2'-OMe modified nucleotide
  modified_base 2: mod_base = OTHER; note = 2-deoxy-2-fluoro ribonucleotide
  modified_base 4: mod_base = OTHER; note = 2-deoxy-2-fluoro ribonucleotide
  modified_base 8: mod_base = OTHER; note = 2-deoxy-2-fluoro ribonucleotide
  modified_base 10: mod_base = OTHER; note = 2-deoxy-2-fluoro ribonucleotide
  modified_base 14: mod_base = OTHER; note = 2-deoxy-2-fluoro ribonucleotide
  modified_base 16: mod_base = OTHER; note = 2-deoxy-2-fluoro ribonucleotide
  modified_base 18: mod_base = OTHER; note = 2-deoxy-2-fluoro ribonucleotide
  modified_base 20..21: mod_base = OTHER; note = phosphorothioate internucleotide linkage
  modified_base 1: mod_base = OTHER; note = Thymine
  modified_base 20..21: mod_base = OTHER; note = Thymine
tgacacctgattctgtttctt

SEQ ID NO: 482 - RNA, 21 nt, synthetic construct
  source 1..21: mol_type = other RNA
  modified_base 1: mod_base = OTHER; note = 2'-deoxy nucleotide
  modified_base 20..21: mod_base = OTHER; note = 2'-deoxy nucleotide
  modified_base 7: mod_base = OTHER; note = 2',3'-seco nucleotide mimics
  modified_base 3: mod_base = OTHER; note = 2'-OMe modified nucleotide
  modified_base 5: mod_base = OTHER; note = 2'-OMe modified nucleotide
  modified_base 9: mod_base = OTHER; note = 2'-OMe modified nucleotide
  modified_base 11: mod_base = OTHER; note = 2'-OMe modified nucleotide
  modified_base 12: mod_base = OTHER; note = 2'-OMe modified nucleotide
  modified_base 13: mod_base = OTHER; note = 2'-OMe modified nucleotide
  modified_base 15: mod_base = OTHER; note = 2'-OMe modified nucleotide
  modified_base 17: mod_base = OTHER; note = 2'-OMe modified nucleotide
  modified_base 19: mod_base = OTHER; note = 2'-OMe modified nucleotide
  modified_base 2: mod_base = OTHER; note = 2-deoxy-2-fluoro ribonucleotide
  modified_base 4: mod_base = OTHER; note = 2-deoxy-2-fluoro ribonucleotide
  modified_base 6: mod_base = OTHER; note = 2-deoxy-2-fluoro ribonucleotide
  modified_base 8: mod_base = OTHER; note = 2-deoxy-2-fluoro ribonucleotide
  modified_base 10: mod_base = OTHER; note = 2-deoxy-2-fluoro ribonucleotide
  modified_base 14: mod_base = OTHER; note = 2-deoxy-2-fluoro ribonucleotide
  modified_base 16: mod_base = OTHER; note = 2-deoxy-2-fluoro ribonucleotide
  modified_base 18: mod_base = OTHER; note = 2-deoxy-2-fluoro ribonucleotide
  modified_base 20..21: mod_base = OTHER; note = phosphorothioate internucleotide linkage
  modified_base 1: mod_base = OTHER; note = Thymine
  modified_base 20..21: mod_base = OTHER; note = Thymine
tgacacctgattctgtttctt

SEQ ID NO: 483 - RNA, 21 nt, synthetic construct
  source 1..21: mol_type = other RNA
  modified_base 1: mod_base = OTHER; note = 2'-deoxy nucleotide
  modified_base 20..21: mod_base = OTHER; note = 2'-deoxy nucleotide
  modified_base 3: mod_base = OTHER; note = 2'-OMe modified nucleotide
  modified_base 5: mod_base = OTHER; note = 2'-OMe modified nucleotide
  modified_base 7: mod_base = OTHER; note = 2'-OMe modified nucleotide
  modified_base 9: mod_base = OTHER; note = 2'-OMe modified nucleotide
  modified_base 11: mod_base = OTHER; note = 2'-OMe modified nucleotide
  modified_base 12: mod_base = OTHER; note = 2'-OMe modified nucleotide
  modified_base 13: mod_base = OTHER; note = 2'-OMe modified nucleotide
  modified_base 15: mod_base = OTHER; note = 2'-OMe modified nucleotide
  modified_base 17: mod_base = OTHER; note = 2'-OMe modified nucleotide
  modified_base 19: mod_base = OTHER; note = 2'-OMe modified nucleotide
  modified_base 2: mod_base = OTHER; note = 2-deoxy-2-fluoro ribonucleotide
  modified_base 4: mod_base = OTHER; note = 2-deoxy-2-fluoro ribonucleotide
  modified_base 6: mod_base = OTHER; note = 2-deoxy-2-fluoro ribonucleotide
  modified_base 8: mod_base = OTHER; note = 2-deoxy-2-fluoro ribonucleotide
  modified_base 10: mod_base = OTHER; note = 2-deoxy-2-fluoro ribonucleotide
  modified_base 14: mod_base = OTHER; note = 2-deoxy-2-fluoro ribonucleotide
  modified_base 16: mod_base = OTHER; note = 2-deoxy-2-fluoro ribonucleotide
  modified_base 18: mod_base = OTHER; note = 2-deoxy-2-fluoro ribonucleotide
  modified_base 20..21: mod_base = OTHER; note = phosphorothioate internucleotide linkage
  modified_base 1: mod_base = OTHER; note = Thymine
  modified_base 20..21: mod_base = OTHER; note = Thymine
tgtccgactatgctggtgttt

SEQ ID NO: 484 - RNA, 21 nt, synthetic construct
  source 1..21: mol_type = other RNA
  modified_base 1: mod_base = OTHER; note = 2'-deoxy nucleotide
  modified_base 20..21: mod_base = OTHER; note = 2'-deoxy nucleotide
  modified_base 6: mod_base = OTHER; note = 2',3'-seco nucleotide mimics
  modified_base 3: mod_base = OTHER; note = 2'-OMe modified nucleotide
  modified_base 5: mod_base = OTHER; note = 2'-OMe modified nucleotide
  modified_base 7: mod_base = OTHER; note = 2'-OMe modified nucleotide
  modified_base 9: mod_base = OTHER; note = 2'-OMe modified nucleotide
  modified_base 11: mod_base = OTHER; note = 2'-OMe modified nucleotide
  modified_base 12: mod_base = OTHER; note = 2'-OMe modified nucleotide
  modified_base 13: mod_base = OTHER; note = 2'-OMe modified nucleotide
  modified_base 15: mod_base = OTHER; note = 2'-OMe modified nucleotide
  modified_base 17: mod_base = OTHER; note = 2'-OMe modified nucleotide
  modified_base 19: mod_base = OTHER; note = 2'-OMe modified nucleotide
  modified_base 2: mod_base = OTHER; note = 2-deoxy-2-fluoro ribonucleotide
  modified_base 4: mod_base = OTHER; note = 2-deoxy-2-fluoro ribonucleotide
  modified_base 8: mod_base = OTHER; note = 2-deoxy-2-fluoro ribonucleotide
  modified_base 10: mod_base = OTHER; note = 2-deoxy-2-fluoro ribonucleotide
  modified_base 14: mod_base = OTHER; note = 2-deoxy-2-fluoro ribonucleotide
  modified_base 16: mod_base = OTHER; note = 2-deoxy-2-fluoro ribonucleotide
  modified_base 18: mod_base = OTHER; note = 2-deoxy-2-fluoro ribonucleotide
  modified_base 20..21: mod_base = OTHER; note = phosphorothioate internucleotide linkage
  modified_base 1: mod_base = OTHER; note = Thymine
  modified_base 20..21: mod_base = OTHER; note = Thymine
tgtccgactatgctggtgttt

SEQ ID NO: 485 - RNA, 21 nt, synthetic construct
  source 1..21: mol_type = other RNA
  modified_base 1: mod_base = OTHER; note = 2'-deoxy nucleotide
  modified_base 20..21: mod_base = OTHER; note = 2'-deoxy nucleotide
  modified_base 7: mod_base = OTHER; note = 2',3'-seco nucleotide mimics
  modified_base 3: mod_base = OTHER; note = 2'-OMe modified nucleotide
  modified_base 5: mod_base = OTHER; note = 2'-OMe modified nucleotide
  modified_base 9: mod_base = OTHER; note = 2'-OMe modified nucleotide
  modified_base 11: mod_base = OTHER; note = 2'-OMe modified nucleotide
  modified_base 12: mod_base = OTHER; note = 2'-OMe modified nucleotide
  modified_base 13: mod_base = OTHER; note = 2'-OMe modified nucleotide
  modified_base 15: mod_base = OTHER; note = 2'-OMe modified nucleotide
  modified_base 17: mod_base = OTHER; note = 2'-OMe modified nucleotide
  modified_base 19: mod_base = OTHER; note = 2'-OMe modified nucleotide
  modified_base 2: mod_base = OTHER; note = 2-deoxy-2-fluoro ribonucleotide
  modified_base 4: mod_base = OTHER; note = 2-deoxy-2-fluoro ribonucleotide
  modified_base 6: mod_base = OTHER; note = 2-deoxy-2-fluoro ribonucleotide
  modified_base 8: mod_base = OTHER; note = 2-deoxy-2-fluoro ribonucleotide
  modified_base 10: mod_base = OTHER; note = 2-deoxy-2-fluoro ribonucleotide
  modified_base 14: mod_base = OTHER; note = 2-deoxy-2-fluoro ribonucleotide
  modified_base 16: mod_base = OTHER; note = 2-deoxy-2-fluoro ribonucleotide
  modified_base 18: mod_base = OTHER; note = 2-deoxy-2-fluoro ribonucleotide
  modified_base 20..21: mod_base = OTHER; note = phosphorothioate internucleotide linkage
  modified_base 1: mod_base = OTHER; note = Thymine
  modified_base 20..21: mod_base = OTHER; note = Thymine
tgtccgactatgctggtgttt

SEQ ID NO: 486 - RNA, 21 nt, synthetic construct
  source 1..21: mol_type = other RNA
  modified_base 1: mod_base = OTHER; note = 2'-deoxy nucleotide
  modified_base 20..21: mod_base = OTHER; note = 2'-deoxy nucleotide
  modified_base 3: mod_base = OTHER; note = 2'-OMe modified nucleotide
  modified_base 5: mod_base = OTHER; note = 2'-OMe modified nucleotide
  modified_base 7: mod_base = OTHER; note = 2'-OMe modified nucleotide
  modified_base 9: mod_base = OTHER; note = 2'-OMe modified nucleotide
  modified_base 11: mod_base = OTHER; note = 2'-OMe modified nucleotide
  modified_base 12: mod_base = OTHER; note = 2'-OMe modified nucleotide
  modified_base 13: mod_base = OTHER; note = 2'-OMe modified nucleotide
  modified_base 15: mod_base = OTHER; note = 2'-OMe modified nucleotide
  modified_base 17: mod_base = OTHER; note = 2'-OMe modified nucleotide
  modified_base 19: mod_base = OTHER; note = 2'-OMe modified nucleotide
  modified_base 2: mod_base = OTHER; note = 2-deoxy-2-fluoro ribonucleotide
  modified_base 4: mod_base = OTHER; note = 2-deoxy-2-fluoro ribonucleotide
  modified_base 6: mod_base = OTHER; note = 2-deoxy-2-fluoro ribonucleotide
  modified_base 8: mod_base = OTHER; note = 2-deoxy-2-fluoro ribonucleotide
  modified_base 10: mod_base = OTHER; note = 2-deoxy-2-fluoro ribonucleotide
  modified_base 14: mod_base = OTHER; note = 2-deoxy-2-fluoro ribonucleotide
  modified_base 16: mod_base = OTHER; note = 2-deoxy-2-fluoro ribonucleotide
  modified_base 18: mod_base = OTHER; note = 2-deoxy-2-fluoro ribonucleotide
  modified_base 20..21: mod_base = OTHER; note = phosphorothioate internucleotide linkage
  modified_base 1: mod_base = OTHER; note = Thymine
  modified_base 20..21: mod_base = OTHER; note = Thymine
tcgaatctcagcatctggatt

SEQ ID NO: 487 - RNA, 21 nt, synthetic construct
  source 1..21: mol_type = other RNA
  modified_base 1: mod_base = OTHER; note = 2'-deoxy nucleotide
  modified_base 20..21: mod_base = OTHER; note = 2'-deoxy nucleotide
  modified_base 6: mod_base = OTHER; note = 2',3'-seco nucleotide mimics
  modified_base 3: mod_base = OTHER; note = 2'-OMe modified nucleotide
  modified_base 5: mod_base = OTHER; note = 2'-OMe modified nucleotide
  modified_base 7: mod_base = OTHER; note = 2'-OMe modified nucleotide
  modified_base 9: mod_base = OTHER; note = 2'-OMe modified nucleotide
  modified_base 11: mod_base = OTHER; note = 2'-OMe modified nucleotide
  modified_base 12: mod_base = OTHER; note = 2'-OMe modified nucleotide
  modified_base 13: mod_base = OTHER; note = 2'-OMe modified nucleotide
  modified_base 15: mod_base = OTHER; note = 2'-OMe modified nucleotide
  modified_base 17: mod_base = OTHER; note = 2'-OMe modified nucleotide
  modified_base 19: mod_base = OTHER; note = 2'-OMe modified nucleotide
  modified_base 2: mod_base = OTHER; note = 2-deoxy-2-fluoro ribonucleotide
  modified_base 4: mod_base = OTHER; note = 2-deoxy-2-fluoro ribonucleotide
  modified_base 8: mod_base = OTHER; note = 2-deoxy-2-fluoro ribonucleotide
  modified_base 10: mod_base = OTHER; note = 2-deoxy-2-fluoro ribonucleotide
  modified_base 14: mod_base = OTHER; note = 2-deoxy-2-fluoro ribonucleotide
  modified_base 16: mod_base = OTHER; note = 2-deoxy-2-fluoro ribonucleotide
  modified_base 18: mod_base = OTHER; note = 2-deoxy-2-fluoro ribonucleotide
  modified_base 20..21: mod_base = OTHER; note = phosphorothioate internucleotide linkage
  modified_base 1: mod_base = OTHER; note = Thymine
  modified_base 20..21: mod_base = OTHER; note = Thymine
tcgaatctcagcatctggatt

SEQ ID NO: 488 - RNA, 21 nt, synthetic construct
  source 1..21: mol_type = other RNA
  modified_base 1: mod_base = OTHER; note = 2'-deoxy nucleotide
  modified_base 20..21: mod_base = OTHER; note = 2'-deoxy nucleotide
  modified_base 7: mod_base = OTHER; note = 2',3'-seco nucleotide mimics
  modified_base 3: mod_base = OTHER; note = 2'-OMe modified nucleotide
  modified_base 5: mod_base = OTHER; note = 2'-OMe modified nucleotide
  modified_base 9: mod_base = OTHER; note = 2'-OMe modified nucleotide
  modified_base 11: mod_base = OTHER; note = 2'-OMe modified nucleotide
  modified_base 12: mod_base = OTHER; note = 2'-OMe modified nucleotide
  modified_base 13: mod_base = OTHER; note = 2'-OMe modified nucleotide
  modified_base 15: mod_base = OTHER; note = 2'-OMe modified nucleotide
  modified_base 17: mod_base = OTHER; note = 2'-OMe modified nucleotide
  modified_base 19: mod_base = OTHER; note = 2'-OMe modified nucleotide
  modified_base 2: mod_base = OTHER; note = 2-deoxy-2-fluoro ribonucleotide
  modified_base 4: mod_base = OTHER; note = 2-deoxy-2-fluoro ribonucleotide
  modified_base 6: mod_base = OTHER; note = 2-deoxy-2-fluoro ribonucleotide
  modified_base 8: mod_base = OTHER; note = 2-deoxy-2-fluoro ribonucleotide
  modified_base 10: mod_base = OTHER; note = 2-deoxy-2-fluoro ribonucleotide
  modified_base 14: mod_base = OTHER; note = 2-deoxy-2-fluoro ribonucleotide
  modified_base 16: mod_base = OTHER; note = 2-deoxy-2-fluoro ribonucleotide
  modified_base 18: mod_base = OTHER; note = 2-deoxy-2-fluoro ribonucleotide
  modified_base 20..21: mod_base = OTHER; note = phosphorothioate internucleotide linkage
  modified_base 1: mod_base = OTHER; note = Thymine
  modified_base 20..21: mod_base = OTHER; note = Thymine
tcgaatctcagcatctggatt

SEQ ID NO: 489 - RNA, 21 nt, synthetic construct
  source 1..21: mol_type = other RNA
  modified_base 1: mod_base = OTHER; note = 2'-deoxy nucleotide
  modified_base 20..21: mod_base = OTHER; note = 2'-deoxy nucleotide
  modified_base 3: mod_base = OTHER; note = 2'-OMe modified nucleotide
  modified_base 5: mod_base = OTHER; note = 2'-OMe modified nucleotide
  modified_base 7: mod_base = OTHER; note = 2'-OMe modified nucleotide
  modified_base 9: mod_base = OTHER; note = 2'-OMe modified nucleotide
  modified_base 11: mod_base = OTHER; note = 2'-OMe modified nucleotide
  modified_base 12: mod_base = OTHER; note = 2'-OMe modified nucleotide
  modified_base 13: mod_base = OTHER; note = 2'-OMe modified nucleotide
  modified_base 15: mod_base = OTHER; note = 2'-OMe modified nucleotide
  modified_base 17: mod_base = OTHER; note = 2'-OMe modified nucleotide
  modified_base 19: mod_base = OTHER; note = 2'-OMe modified nucleotide
  modified_base 2: mod_base = OTHER; note = 2-deoxy-2-fluoro ribonucleotide
  modified_base 4: mod_base = OTHER; note = 2-deoxy-2-fluoro ribonucleotide
  modified_base 6: mod_base = OTHER; note = 2-deoxy-2-fluoro ribonucleotide
  modified_base 8: mod_base = OTHER; note = 2-deoxy-2-fluoro ribonucleotide
  modified_base 10: mod_base = OTHER; note = 2-deoxy-2-fluoro ribonucleotide
  modified_base 14: mod_base = OTHER; note = 2-deoxy-2-fluoro ribonucleotide
  modified_base 16: mod_base = OTHER; note = 2-deoxy-2-fluoro ribonucleotide
  modified_base 18: mod_base = OTHER; note = 2-deoxy-2-fluoro ribonucleotide
  modified_base 20..21: mod_base = OTHER; note = phosphorothioate internucleotide linkage
  modified_base 1: mod_base = OTHER; note = Thymine
  modified_base 20..21: mod_base = OTHER; note = Thymine
taagggcgaatctcagcattt

SEQ ID NO: 490 - RNA, 21 nt, synthetic construct
  source 1..21: mol_type = other RNA
  modified_base 1: mod_base = OTHER; note = 2'-deoxy nucleotide
  modified_base 20..21: mod_base = OTHER; note = 2'-deoxy nucleotide
  modified_base 6: mod_base = OTHER; note = 2',3'-seco nucleotide mimics
  modified_base 3: mod_base = OTHER; note = 2'-OMe modified nucleotide
  modified_base 5: mod_base = OTHER; note = 2'-OMe modified nucleotide
  modified_base 7: mod_base = OTHER; note = 2'-OMe modified nucleotide
  modified_base 9: mod_base = OTHER; note = 2'-OMe modified nucleotide
  modified_base 11: mod_base = OTHER; note = 2'-OMe modified nucleotide
  modified_base 12: mod_base = OTHER; note = 2'-OMe modified nucleotide
  modified_base 13: mod_base = OTHER; note = 2'-OMe modified nucleotide
  modified_base 15: mod_base = OTHER; note = 2'-OMe modified nucleotide
  modified_base 17: mod_base = OTHER; note = 2'-OMe modified nucleotide
  modified_base 19: mod_base = OTHER; note = 2'-OMe modified nucleotide
  modified_base 2: mod_base = OTHER; note = 2-deoxy-2-fluoro ribonucleotide
  modified_base 4: mod_base = OTHER; note = 2-deoxy-2-fluoro ribonucleotide
  modified_base 8: mod_base = OTHER; note = 2-deoxy-2-fluoro ribonucleotide
  modified_base 10: mod_base = OTHER; note = 2-deoxy-2-fluoro ribonucleotide
  modified_base 14: mod_base = OTHER; note = 2-deoxy-2-fluoro ribonucleotide
  modified_base 16: mod_base = OTHER; note = 2-deoxy-2-fluoro ribonucleotide
  modified_base 18: mod_base = OTHER; note = 2-deoxy-2-fluoro ribonucleotide
  modified_base 20..21: mod_base = OTHER; note = phosphorothioate internucleotide linkage
  modified_base 1: mod_base = OTHER; note = Thymine
  modified_base 20..21: mod_base = OTHER; note = Thymine
taagggcgaatctcagcattt

SEQ ID NO: 491 - RNA, 21 nt, synthetic construct
  source 1..21: mol_type = other RNA
  modified_base 1: mod_base = OTHER; note = 2'-deoxy nucleotide
  modified_base 20..21: mod_base = OTHER; note = 2'-deoxy nucleotide
  modified_base 7: mod_base = OTHER; note = 2',3'-seco nucleotide mimics
  modified_base 3: mod_base = OTHER; note = 2'-OMe modified nucleotide
  modified_base 5: mod_base = OTHER; note = 2'-OMe modified nucleotide
  modified_base 9: mod_base = OTHER; note = 2'-OMe modified nucleotide
  modified_base 11: mod_base = OTHER; note = 2'-OMe modified nucleotide
  modified_base 12: mod_base = OTHER; note = 2'-OMe modified nucleotide
  modified_base 13: mod_base = OTHER; note = 2'-OMe modified nucleotide
  modified_base 15: mod_base = OTHER; note = 2'-OMe modified nucleotide
  modified_base 17: mod_base = OTHER; note = 2'-OMe modified nucleotide
  modified_base 19: mod_base = OTHER; note = 2'-OMe modified nucleotide
  modified_base 2: mod_base = OTHER; note = 2-deoxy-2-fluoro ribonucleotide
  modified_base 4: mod_base = OTHER; note = 2-deoxy-2-fluoro ribonucleotide
  modified_base 6: mod_base = OTHER; note = 2-deoxy-2-fluoro ribonucleotide
  modified_base 8: mod_base = OTHER; note = 2-deoxy-2-fluoro ribonucleotide
  modified_base 10: mod_base = OTHER; note = 2-deoxy-2-fluoro ribonucleotide
  modified_base 14: mod_base = OTHER; note = 2-deoxy-2-fluoro ribonucleotide
  modified_base 16: mod_base = OTHER; note = 2-deoxy-2-fluoro ribonucleotide
  modified_base 18: mod_base = OTHER; note = 2-deoxy-2-fluoro ribonucleotide
  modified_base 20..21: mod_base = OTHER; note = phosphorothioate internucleotide linkage
  modified_base 1: mod_base = OTHER; note = Thymine
  modified_base 20..21: mod_base = OTHER; note = Thymine
taagggcgaatctcagcattt

SEQ ID NO: 492 - RNA, 21 nt, synthetic construct
  source 1..21: mol_type = other RNA
  modified_base 1: mod_base = OTHER; note = 2'-deoxy nucleotide
  modified_base 20..21: mod_base = OTHER; note = 2'-deoxy nucleotide
  modified_base 3: mod_base = OTHER; note = 2'-OMe modified nucleotide
  modified_base 5: mod_base = OTHER; note = 2'-OMe modified nucleotide
  modified_base 7: mod_base = OTHER; note = 2'-OMe modified nucleotide
  modified_base 9: mod_base = OTHER; note = 2'-OMe modified nucleotide
  modified_base 11: mod_base = OTHER; note = 2'-OMe modified nucleotide
  modified_base 12: mod_base = OTHER; note = 2'-OMe modified nucleotide
  modified_base 13: mod_base = OTHER; note = 2'-OMe modified nucleotide
  modified_base 15: mod_base = OTHER; note = 2'-OMe modified nucleotide
  modified_base 17: mod_base = OTHER; note = 2'-OMe modified nucleotide
  modified_base 19: mod_base = OTHER; note = 2'-OMe modified nucleotide
  modified_base 2: mod_base = OTHER; note = 2-deoxy-2-fluoro ribonucleotide
  modified_base 4: mod_base = OTHER; note = 2-deoxy-2-fluoro ribonucleotide
  modified_base 6: mod_base = OTHER; note = 2-deoxy-2-fluoro ribonucleotide
  modified_base 8: mod_base = OTHER; note = 2-deoxy-2-fluoro ribonucleotide
  modified_base 10: mod_base = OTHER; note = 2-deoxy-2-fluoro ribonucleotide
  modified_base 14: mod_base = OTHER; note = 2-deoxy-2-fluoro ribonucleotide
  modified_base 16: mod_base = OTHER; note = 2-deoxy-2-fluoro ribonucleotide
  modified_base 18: mod_base = OTHER; note = 2-deoxy-2-fluoro ribonucleotide
  modified_base 20..21: mod_base = OTHER; note = phosphorothioate internucleotide linkage
  modified_base 1: mod_base = OTHER; note = Thymine
  modified_base 20..21: mod_base = OTHER; note = Thymine
ttgacactgggatccatggtt

SEQ ID NO: 493 - RNA, 21 nt, synthetic construct
  source 1..21: mol_type = other RNA
  modified_base 1: mod_base = OTHER; note = 2'-deoxy nucleotide
  modified_base 20..21: mod_base = OTHER; note = 2'-deoxy nucleotide
  modified_base 6: mod_base = OTHER; note = 2',3'-seco nucleotide mimics
  modified_base 3: mod_base = OTHER; note = 2'-OMe modified nucleotide
  modified_base 5: mod_base = OTHER; note = 2'-OMe modified nucleotide
  modified_base 7: mod_base = OTHER; note = 2'-OMe modified nucleotide
  modified_base 9: mod_base = OTHER; note = 2'-OMe modified nucleotide
  modified_base 11: mod_base = OTHER; note = 2'-OMe modified nucleotide
  modified_base 12: mod_base = OTHER; note = 2'-OMe modified nucleotide
  modified_base 13: mod_base = OTHER; note = 2'-OMe modified nucleotide
  modified_base 15: mod_base = OTHER; note = 2'-OMe modified nucleotide
  modified_base 17: mod_base = OTHER; note = 2'-OMe modified nucleotide
  modified_base 19: mod_base = OTHER; note = 2'-OMe modified nucleotide
  modified_base 2: mod_base = OTHER; note = 2-deoxy-2-fluoro ribonucleotide
  modified_base 4: mod_base = OTHER; note = 2-deoxy-2-fluoro ribonucleotide
  modified_base 8: mod_base = OTHER; note = 2-deoxy-2-fluoro ribonucleotide
  modified_base 10: mod_base = OTHER; note = 2-deoxy-2-fluoro ribonucleotide
  modified_base 14: mod_base = OTHER; note = 2-deoxy-2-fluoro ribonucleotide
  modified_base 16: mod_base = OTHER; note = 2-deoxy-2-fluoro ribonucleotide
  modified_base 18: mod_base = OTHER; note = 2-deoxy-2-fluoro ribonucleotide
  modified_base 20..21: mod_base = OTHER; note = phosphorothioate internucleotide linkage
  modified_base 1: mod_base = OTHER; note = Thymine
  modified_base 20..21: mod_base = OTHER; note = Thymine
ttgacactgggatccatggtt

SEQ ID NO: 494 - RNA, 21 nt, synthetic construct
  source 1..21: mol_type = other RNA
  modified_base 1: mod_base = OTHER; note = 2'-deoxy nucleotide
  modified_base 20..21: mod_base = OTHER; note = 2'-deoxy nucleotide
  modified_base 7: mod_base = OTHER; note = 2',3'-seco nucleotide mimics
  modified_base 3: mod_base = OTHER; note = 2'-OMe modified nucleotide
  modified_base 5: mod_base = OTHER; note = 2'-OMe modified nucleotide
  modified_base 9: mod_base = OTHER; note = 2'-OMe modified nucleotide
  modified_base 11: mod_base = OTHER; note = 2'-OMe modified nucleotide
  modified_base 12: mod_base = OTHER; note = 2'-OMe modified nucleotide
  modified_base 13: mod_base = OTHER; note = 2'-OMe modified nucleotide
  modified_base 15: mod_base = OTHER; note = 2'-OMe modified nucleotide
  modified_base 17: mod_base = OTHER; note = 2'-OMe modified nucleotide
  modified_base 19: mod_base = OTHER; note = 2'-OMe modified nucleotide
  modified_base 2: mod_base = OTHER; note = 2-deoxy-2-fluoro ribonucleotide
  modified_base 4: mod_base = OTHER; note = 2-deoxy-2-fluoro ribonucleotide
  modified_base 6: mod_base = OTHER; note = 2-deoxy-2-fluoro ribonucleotide
  modified_base 8: mod_base = OTHER; note = 2-deoxy-2-fluoro ribonucleotide
  modified_base 10: mod_base = OTHER; note = 2-deoxy-2-fluoro ribonucleotide
  modified_base 14: mod_base = OTHER; note = 2-deoxy-2-fluoro ribonucleotide
  modified_base 16: mod_base = OTHER; note = 2-deoxy-2-fluoro ribonucleotide
  modified_base 18: mod_base = OTHER; note = 2-deoxy-2-fluoro ribonucleotide
  modified_base 20..21: mod_base = OTHER; note = phosphorothioate internucleotide linkage
  modified_base 1: mod_base = OTHER; note = Thymine
  modified_base 20..21: mod_base = OTHER; note = Thymine
ttgacactgggatccatggtt

SEQ ID NO: 495 - RNA, 21 nt, synthetic construct
  source 1..21: mol_type = other RNA
  modified_base 1: mod_base = OTHER; note = 2'-deoxy nucleotide
  modified_base 20..21: mod_base = OTHER; note = 2'-deoxy nucleotide
  modified_base 3: mod_base = OTHER; note = 2'-OMe modified nucleotide
  modified_base 5: mod_base = OTHER; note = 2'-OMe modified nucleotide
  modified_base 7: mod_base = OTHER; note = 2'-OMe modified nucleotide
  modified_base 9: mod_base = OTHER; note = 2'-OMe modified nucleotide
  modified_base 11: mod_base = OTHER; note = 2'-OMe modified nucleotide
  modified_base 12: mod_base = OTHER; note = 2'-OMe modified nucleotide
  modified_base 13: mod_base = OTHER; note = 2'-OMe modified nucleotide
  modified_base 15: mod_base = OTHER; note = 2'-OMe modified nucleotide
  modified_base 17: mod_base = OTHER; note = 2'-OMe modified nucleotide
  modified_base 19: mod_base = OTHER; note = 2'-OMe modified nucleotide
  modified_base 2: mod_base = OTHER; note = 2-deoxy-2-fluoro ribonucleotide
  modified_base 4: mod_base = OTHER; note = 2-deoxy-2-fluoro ribonucleotide
  modified_base 6: mod_base = OTHER; note = 2-deoxy-2-fluoro ribonucleotide
  modified_base 8: mod_base = OTHER; note = 2-deoxy-2-fluoro ribonucleotide
  modified_base 10: mod_base = OTHER; note = 2-deoxy-2-fluoro ribonucleotide
  modified_base 14: mod_base = OTHER; note = 2-deoxy-2-fluoro ribonucleotide
  modified_base 16: mod_base = OTHER; note = 2-deoxy-2-fluoro ribonucleotide
  modified_base 18: mod_base = OTHER; note = 2-deoxy-2-fluoro ribonucleotide
  modified_base 20..21: mod_base = OTHER; note = phosphorothioate internucleotide linkage
  modified_base 1: mod_base = OTHER; note = Thymine
  modified_base 20..21: mod_base = OTHER; note = Thymine
tcaataaggggctgccacatt

SEQ ID NO: 496 - RNA, 21 nt, synthetic construct
  source 1..21: mol_type = other RNA
  modified_base 1: mod_base = OTHER; note = 2'-deoxy nucleotide
  modified_base 20..21: mod_base = OTHER; note = 2'-deoxy nucleotide
  modified_base 3: mod_base = OTHER; note = 2'-OMe modified nucleotide
  modified_base 5: mod_base = OTHER; note = 2'-OMe modified nucleotide
  modified_base 7: mod_base = OTHER; note = 2'-OMe modified nucleotide
  modified_base 9: mod_base = OTHER; note = 2'-OMe modified nucleotide
  modified_base 11: mod_base = OTHER; note = 2'-OMe modified nucleotide
  modified_base 12: mod_base = OTHER; note = 2'-OMe modified nucleotide
  modified_base 13: mod_base = OTHER; note = 2'-OMe modified nucleotide
  modified_base 15: mod_base = OTHER; note = 2'-OMe modified nucleotide
  modified_base 17: mod_base = OTHER; note = 2'-OMe modified nucleotide
  modified_base 19: mod_base = OTHER; note = 2'-OMe modified nucleotide
  modified_base 2: mod_base = OTHER; note = 2-deoxy-2-fluoro ribonucleotide
  modified_base 4: mod_base = OTHER; note = 2-deoxy-2-fluoro ribonucleotide
  modified_base 6: mod_base = OTHER; note = 2-deoxy-2-fluoro ribonucleotide
  modified_base 8: mod_base = OTHER; note = 2-deoxy-2-fluoro ribonucleotide
  modified_base 10: mod_base = OTHER; note = 2-deoxy-2-fluoro ribonucleotide
  modified_base 14: mod_base = OTHER; note = 2-deoxy-2-fluoro ribonucleotide
  modified_base 16: mod_base = OTHER; note = 2-deoxy-2-fluoro ribonucleotide
  modified_base 18: mod_base = OTHER; note = 2-deoxy-2-fluoro ribonucleotide
  modified_base 20..21: mod_base = OTHER; note = phosphorothioate internucleotide linkage
  modified_base 1: mod_base = OTHER; note = Thymine
  modified_base 20..21: mod_base = OTHER; note = Thymine
tctgcgtctgagcattgtgtt

SEQ ID NO: 497 - RNA, 21 nt, synthetic construct
  source 1..21: mol_type = other RNA
  modified_base 1: mod_base = OTHER; note = 2'-deoxy nucleotide
  modified_base 20..21: mod_base = OTHER; note = 2'-deoxy nucleotide
  modified_base 3: mod_base = OTHER; note = 2'-OMe modified nucleotide
  modified_base 5: mod_base = OTHER; note = 2'-OMe modified nucleotide
  modified_base 7: mod_base = OTHER; note = 2'-OMe modified nucleotide
  modified_base 9: mod_base = OTHER; note = 2'-OMe modified nucleotide
  modified_base 11: mod_base = OTHER; note = 2'-OMe modified nucleotide
  modified_base 12: mod_base = OTHER; note = 2'-OMe modified nucleotide
  modified_base 13: mod_base = OTHER; note = 2'-OMe modified nucleotide
  modified_base 15: mod_base = OTHER; note = 2'-OMe modified nucleotide
  modified_base 17: mod_base = OTHER; note = 2'-OMe modified nucleotide
  modified_base 19: mod_base = OTHER; note = 2'-OMe modified nucleotide
  modified_base 2: mod_base = OTHER; note = 2-deoxy-2-fluoro ribonucleotide
  modified_base 4: mod_base = OTHER; note = 2-deoxy-2-fluoro ribonucleotide
  modified_base 6: mod_base = OTHER; note = 2-deoxy-2-fluoro ribonucleotide
  modified_base 8: mod_base = OTHER; note = 2-deoxy-2-fluoro ribonucleotide
  modified_base 10: mod_base = OTHER; note = 2-deoxy-2-fluoro ribonucleotide
  modified_base 14: mod_base = OTHER; note = 2-deoxy-2-fluoro ribonucleotide
  modified_base 16: mod_base = OTHER; note = 2-deoxy-2-fluoro ribonucleotide
  modified_base 18: mod_base = OTHER; note = 2-deoxy-2-fluoro ribonucleotide
  modified_base 20..21: mod_base = OTHER; note = phosphorothioate internucleotide linkage
  modified_base 1: mod_base = OTHER; note = Thymine
  modified_base 20..21: mod_base = OTHER; note = Thymine
tacaggatctggatttcggtt

SEQ ID NO: 498 - RNA, 21 nt, synthetic construct
  source 1..21: mol_type = other RNA
  modified_base 1: mod_base = OTHER; note = 2'-deoxy nucleotide
  modified_base 20..21: mod_base = OTHER; note = 2'-deoxy nucleotide
  modified_base 3: mod_base = OTHER; note = 2'-OMe modified nucleotide
  modified_base 5: mod_base = OTHER; note = 2'-OMe modified nucleotide
  modified_base 7: mod_base = OTHER; note = 2'-OMe modified nucleotide
  modified_base 9: mod_base = OTHER; note = 2'-OMe modified nucleotide
  modified_base 11: mod_base = OTHER; note = 2'-OMe modified nucleotide
  modified_base 12: mod_base = OTHER; note = 2'-OMe modified nucleotide
  modified_base 13: mod_base = OTHER; note = 2'-OMe modified nucleotide
  modified_base 15: mod_base = OTHER; note = 2'-OMe modified nucleotide
  modified_base 17: mod_base = OTHER; note = 2'-OMe modified nucleotide
  modified_base 19: mod_base = OTHER; note = 2'-OMe modified nucleotide
  modified_base 2: mod_base = OTHER; note = 2-deoxy-2-fluoro ribonucleotide
  modified_base 4: mod_base = OTHER; note = 2-deoxy-2-fluoro ribonucleotide
  modified_base 6: mod_base = OTHER; note = 2-deoxy-2-fluoro ribonucleotide
  modified_base 8: mod_base = OTHER; note = 2-deoxy-2-fluoro ribonucleotide
  modified_base 10: mod_base = OTHER; note = 2-deoxy-2-fluoro ribonucleotide
  modified_base 14: mod_base = OTHER; note = 2-deoxy-2-fluoro ribonucleotide
  modified_base 16: mod_base = OTHER; note = 2-deoxy-2-fluoro ribonucleotide
  modified_base 18: mod_base = OTHER; note = 2-deoxy-2-fluoro ribonucleotide
  modified_base 20..21: mod_base = OTHER; note = phosphorothioate internucleotide linkage
  modified_base 1: mod_base = OTHER; note = Thymine
  modified_base 20..21: mod_base = OTHER; note = Thymine
tccgggggtttcctcagtctt

SEQ ID NO: 499 - RNA, 21 nt, synthetic construct
  source 1..21: mol_type = other RNA
  modified_base 1: mod_base = OTHER; note = 2'-deoxy nucleotide
  modified_base 20..21: mod_base = OTHER; note = 2'-deoxy nucleotide
  modified_base 3: mod_base = OTHER; note = 2'-OMe modified nucleotide
  modified_base 5: mod_base = OTHER; note = 2'-OMe modified nucleotide
  modified_base 7: mod_base = OTHER; note = 2'-OMe modified nucleotide
  modified_base 9: mod_base = OTHER; note = 2'-OMe modified nucleotide
  modified_base 11: mod_base = OTHER; note = 2'-OMe modified nucleotide
  modified_base 12: mod_base = OTHER; note = 2'-OMe modified nucleotide
  modified_base 13: mod_base = OTHER; note = 2'-OMe modified nucleotide
  modified_base 15: mod_base = OTHER; note = 2'-OMe modified nucleotide
  modified_base 17: mod_base = OTHER; note = 2'-OMe modified nucleotide
  modified_base 19: mod_base = OTHER; note = 2'-OMe modified nucleotide
  modified_base 2: mod_base = OTHER; note = 2-deoxy-2-fluoro ribonucleotide
  modified_base 4: mod_base = OTHER; note = 2-deoxy-2-fluoro ribonucleotide
  modified_base 6: mod_base = OTHER; note = 2-deoxy-2-fluoro ribonucleotide
  modified_base 8: mod_base = OTHER; note = 2-deoxy-2-fluoro ribonucleotide
  modified_base 10: mod_base = OTHER; note = 2-deoxy-2-fluoro ribonucleotide
  modified_base 14: mod_base = OTHER; note = 2-deoxy-2-fluoro ribonucleotide
  modified_base 16: mod_base = OTHER; note = 2-deoxy-2-fluoro ribonucleotide
  modified_base 18: mod_base = OTHER; note = 2-deoxy-2-fluoro ribonucleotide
  modified_base 20..21: mod_base = OTHER; note = phosphorothioate internucleotide linkage
  modified_base 1: mod_base = OTHER; note = Thymine
  modified_base 20..21: mod_base = OTHER; note = Thymine
ttgtccataatggtagtagtt

SEQ ID NO: 500 - RNA, 21 nt, synthetic construct
  source 1..21: mol_type = other RNA
  modified_base 1: mod_base = OTHER; note = 2'-deoxy nucleotide
  modified_base 20..21: mod_base = OTHER; note = 2'-deoxy nucleotide
  modified_base 3: mod_base = OTHER; note = 2'-OMe modified nucleotide
  modified_base 5: mod_base = OTHER; note = 2'-OMe modified nucleotide
  modified_base 7: mod_base = OTHER; note = 2'-OMe modified nucleotide
  modified_base 9: mod_base = OTHER; note = 2'-OMe modified nucleotide
  modified_base 11: mod_base = OTHER; note = 2'-OMe modified nucleotide
  modified_base 12: mod_base = OTHER; note = 2'-OMe modified nucleotide
  modified_base 13: mod_base = OTHER; note = 2'-OMe modified nucleotide
  modified_base 15: mod_base = OTHER; note = 2'-OMe modified nucleotide
  modified_base 17: mod_base = OTHER; note = 2'-OMe modified nucleotide
  modified_base 19: mod_base = OTHER; note = 2'-OMe modified nucleotide
  modified_base 2: mod_base = OTHER; note = 2-deoxy-2-fluoro ribonucleotide
  modified_base 4: mod_base = OTHER; note = 2-deoxy-2-fluoro ribonucleotide
  modified_base 6: mod_base = OTHER; note = 2-deoxy-2-fluoro ribonucleotide
  modified_base 8: mod_base = OTHER; note = 2-deoxy-2-fluoro ribonucleotide
  modified_base 10: mod_base = OTHER; note = 2-deoxy-2-fluoro ribonucleotide
  modified_base 14: mod_base = OTHER; note = 2-deoxy-2-fluoro ribonucleotide
  modified_base 16: mod_base = OTHER; note = 2-deoxy-2-fluoro ribonucleotide
  modified_base 18: mod_base = OTHER; note = 2-deoxy-2-fluoro ribonucleotide
  modified_base 20..21: mod_base = OTHER; note = phosphorothioate internucleotide linkage
  modified_base 1: mod_base = OTHER; note = Thymine
  modified_base 20..21: mod_base = OTHER; note = Thymine
ttctgtccataatggtagttt

SEQ ID NO: 501 - RNA, 21 nt, synthetic construct
  source 1..21: mol_type = other RNA
  modified_base 1: mod_base = OTHER; note = 2'-deoxy nucleotide
  modified_base 20..21: mod_base = OTHER; note = 2'-deoxy nucleotide
  modified_base 3: mod_base = OTHER; note = 2'-OMe modified nucleotide
  modified_base 5: mod_base = OTHER; note = 2'-OMe modified nucleotide
  modified_base 7: mod_base = OTHER; note = 2'-OMe modified nucleotide
  modified_base 9: mod_base = OTHER; note = 2'-OMe modified nucleotide
  modified_base 11: mod_base = OTHER; note = 2'-OMe modified nucleotide
  modified_base 12: mod_base = OTHER; note = 2'-OMe modified nucleotide
  modified_base 13: mod_base = OTHER; note = 2'-OMe modified nucleotide
  modified_base 15: mod_base = OTHER; note = 2'-OMe modified nucleotide
  modified_base 17: mod_base = OTHER; note = 2'-OMe modified nucleotide
  modified_base 19: mod_base = OTHER; note = 2'-OMe modified nucleotide
  modified_base 2: mod_base = OTHER; note = 2-deoxy-2-fluoro ribonucleotide
  modified_base 4: mod_base = OTHER; note = 2-deoxy-2-fluoro ribonucleotide
  modified_base 6: mod_base = OTHER; note = 2-deoxy-2-fluoro ribonucleotide
  modified_base 8: mod_base = OTHER; note = 2-deoxy-2-fluoro ribonucleotide
  modified_base 10: mod_base = OTHER; note = 2-deoxy-2-fluoro ribonucleotide
  modified_base 14: mod_base = OTHER; note = 2-deoxy-2-fluoro ribonucleotide
  modified_base 16: mod_base = OTHER; note = 2-deoxy-2-fluoro ribonucleotide
  modified_base 18: mod_base = OTHER; note = 2-deoxy-2-fluoro ribonucleotide
  modified_base 20..21: mod_base = OTHER; note = phosphorothioate internucleotide linkage
  modified_base 1: mod_base = OTHER; note = Thymine
  modified_base 20..21: mod_base = OTHER; note = Thymine
tactctgtccataatggtatt

SEQ ID NO: 502 - RNA, 21 nt, synthetic construct
  source 1..21: mol_type = other RNA
  modified_base 1: mod_base = OTHER; note = 2'-deoxy nucleotide
  modified_base 20..21: mod_base = OTHER; note = 2'-deoxy nucleotide
  modified_base 3: mod_base = OTHER; note = 2'-OMe modified nucleotide
  modified_base 5: mod_base = OTHER; note = 2'-OMe modified nucleotide
  modified_base 7: mod_base = OTHER; note = 2'-OMe modified nucleotide
  modified_base 9: mod_base = OTHER; note = 2'-OMe modified nucleotide
  modified_base 11: mod_base = OTHER; note = 2'-OMe modified nucleotide
  modified_base 12: mod_base = OTHER; note = 2'-OMe modified nucleotide
  modified_base 13: mod_base = OTHER; note = 2'-OMe modified nucleotide
  modified_base 15: mod_base = OTHER; note = 2'-OMe modified nucleotide
  modified_base 17: mod_base = OTHER; note = 2'-OMe modified nucleotide
  modified_base 19: mod_base = OTHER; note = 2'-OMe modified nucleotide
  modified_base 2: mod_base = OTHER; note = 2-deoxy-2-fluoro ribonucleotide
  modified_base 4: mod_base = OTHER; note = 2-deoxy-2-fluoro ribonucleotide
  modified_base 6: mod_base = OTHER; note = 2-deoxy-2-fluoro ribonucleotide
  modified_base 8: mod_base = OTHER; note = 2-deoxy-2-fluoro ribonucleotide
  modified_base 10: mod_base = OTHER; note = 2-deoxy-2-fluoro ribonucleotide
  modified_base 14: mod_base = OTHER; note = 2-deoxy-2-fluoro ribonucleotide
  modified_base 16: mod_base = OTHER; note = 2-deoxy-2-fluoro ribonucleotide
  modified_base 18: mod_base = OTHER; note = 2-deoxy-2-fluoro ribonucleotide
  modified_base 20..21: mod_base = OTHER; note = phosphorothioate internucleotide linkage
  modified_base 1: mod_base = OTHER; note = Thymine
  modified_base 20..21: mod_base = OTHER; note = Thymine
taactctgtccataatggttt

SEQ ID NO: 503 - RNA, 21 nt, synthetic construct
  source 1..21: mol_type = other RNA
  modified_base 1: mod_base = OTHER; note = 2'-deoxy nucleotide
  modified_base 20..21: mod_base = OTHER; note = 2'-deoxy nucleotide
  modified_base 3: mod_base = OTHER; note = 2'-OMe modified nucleotide
  modified_base 5: mod_base = OTHER; note = 2'-OMe modified nucleotide
  modified_base 7: mod_base = OTHER; note = 2'-OMe modified nucleotide
  modified_base 9: mod_base = OTHER; note = 2'-OMe modified nucleotide
  modified_base 11: mod_base = OTHER; note = 2'-OMe modified nucleotide
  modified_base 12: mod_base = OTHER; note = 2'-OMe modified nucleotide
  modified_base 13: mod_base = OTHER; note = 2'-OMe modified nucleotide
  modified_base 15: mod_base = OTHER; note = 2'-OMe modified nucleotide
  modified_base 17: mod_base = OTHER; note = 2'-OMe modified nucleotide
  modified_base 19: mod_base = OTHER; note = 2'-OMe modified nucleotide
  modified_base 2: mod_base = OTHER; note = 2-deoxy-2-fluoro ribonucleotide
  modified_base 4: mod_base = OTHER; note = 2-deoxy-2-fluoro ribonucleotide
  modified_base 6: mod_base = OTHER; note = 2-deoxy-2-fluoro ribonucleotide
  modified_base 8: mod_base = OTHER; note = 2-deoxy-2-fluoro ribonucleotide
  modified_base 10: mod_base = OTHER; note = 2-deoxy-2-fluoro ribonucleotide
  modified_base 14: mod_base = OTHER; note = 2-deoxy-2-fluoro ribonucleotide
  modified_base 16: mod_base = OTHER; note = 2-deoxy-2-fluoro ribonucleotide
  modified_base 18: mod_base = OTHER; note = 2-deoxy-2-fluoro ribonucleotide
  modified_base 20..21: mod_base = OTHER; note = phosphorothioate internucleotide linkage
  modified_base 1: mod_base = OTHER; note = Thymine
  modified_base 20..21: mod_base = OTHER; note = Thymine
tgggcgaatctcagcatcttt

SEQ ID NO: 504 - RNA, 21 nt, synthetic construct
  source 1..21: mol_type = other RNA
  modified_base 1: mod_base = OTHER; note = 2'-deoxy nucleotide
  modified_base 20..21: mod_base = OTHER; note = 2'-deoxy nucleotide
  modified_base 3: mod_base = OTHER; note = 2'-OMe modified nucleotide
  modified_base 5: mod_base = OTHER; note = 2'-OMe modified nucleotide
  modified_base 7: mod_base = OTHER; note = 2'-OMe modified nucleotide
  modified_base 9: mod_base = OTHER; note = 2'-OMe modified nucleotide
  modified_base 11: mod_base = OTHER; note = 2'-OMe modified nucleotide
  modified_base 12: mod_base = OTHER; note = 2'-OMe modified nucleotide
  modified_base 13: mod_base = OTHER; note = 2'-OMe modified nucleotide
  modified_base 15: mod_base = OTHER; note = 2'-OMe modified nucleotide
  modified_base 17: mod_base = OTHER; note = 2'-OMe modified nucleotide
  modified_base 19: mod_base = OTHER; note = 2'-OMe modified nucleotide
  modified_base 2: mod_base = OTHER; note = 2-deoxy-2-fluoro ribonucleotide
  modified_base 4: mod_base = OTHER; note = 2-deoxy-2-fluoro ribonucleotide
  modified_base 6: mod_base = OTHER; note = 2-deoxy-2-fluoro ribonucleotide
  modified_base 8: mod_base = OTHER; note = 2-deoxy-2-fluoro ribonucleotide
  modified_base 10: mod_base = OTHER; note = 2-deoxy-2-fluoro ribonucleotide
  modified_base 14: mod_base = OTHER; note = 2-deoxy-2-fluoro ribonucleotide
  modified_base 16: mod_base = OTHER; note = 2-deoxy-2-fluoro ribonucleotide
  modified_base 18: mod_base = OTHER; note = 2-deoxy-2-fluoro ribonucleotide
  modified_base 20..21: mod_base = OTHER; note = phosphorothioate internucleotide linkage
  modified_base 1: mod_base = OTHER; note = Thymine
  modified_base 20..21: mod_base = OTHER; note = Thymine
tagggcgaatctcagcatctt

SEQ ID NO: 505 - RNA, 21 nt, synthetic construct
  source 1..21: mol_type = other RNA
  modified_base 1: mod_base = OTHER; note = 2'-deoxy nucleotide
  modified_base 20..21: mod_base = OTHER; note = 2'-deoxy nucleotide
  modified_base 3: mod_base = OTHER; note = 2'-OMe modified nucleotide
  modified_base 5: mod_base = OTHER; note = 2'-OMe modified nucleotide
  modified_base 7: mod_base = OTHER; note = 2'-OMe modified nucleotide
  modified_base 9: mod_base = OTHER; note = 2'-OMe modified nucleotide
  modified_base 11: mod_base = OTHER; note = 2'-OMe modified nucleotide
  modified_base 12: mod_base = OTHER; note = 2'-OMe modified nucleotide
  modified_base 13: mod_base = OTHER; note = 2'-OMe modified nucleotide
  modified_base 15: mod_base = OTHER; note = 2'-OMe modified nucleotide
  modified_base 17: mod_base = OTHER; note = 2'-OMe modified nucleotide
  modified_base 19: mod_base = OTHER; note = 2'-OMe modified nucleotide
  modified_base 2: mod_base = OTHER; note = 2-deoxy-2-fluoro ribonucleotide
  modified_base 4: mod_base = OTHER; note = 2-deoxy-2-fluoro ribonucleotide
  modified_base 6: mod_base = OTHER; note = 2-deoxy-2-fluoro ribonucleotide
  modified_base 8: mod_base = OTHER; note = 2-deoxy-2-fluoro ribonucleotide
  modified_base 10: mod_base = OTHER; note = 2-deoxy-2-fluoro ribonucleotide
  modified_base 14: mod_base = OTHER; note = 2-deoxy-2-fluoro ribonucleotide
  modified_base 16: mod_base = OTHER; note = 2-deoxy-2-fluoro ribonucleotide
  modified_base 18: mod_base = OTHER; note = 2-deoxy-2-fluoro ribonucleotide
  modified_base 20..21: mod_base = OTHER; note = phosphorothioate internucleotide linkage
  modified_base 1: mod_base = OTHER; note = Thymine
  modified_base 20..21: mod_base = OTHER; note = Thymine
taacaccaagggcgaatcttt

SEQ ID NO: 506 - RNA, 21 nt, synthetic construct
  source 1..21: mol_type = other RNA
  modified_base 1: mod_base = OTHER; note = 2'-deoxy nucleotide
  modified_base 20..21: mod_base = OTHER; note = 2'-deoxy nucleotide
  modified_base 3: mod_base = OTHER; note = 2'-OMe modified nucleotide
  modified_base 5: mod_base = OTHER; note = 2'-OMe modified nucleotide
  modified_base 7: mod_base = OTHER; note = 2'-OMe modified nucleotide
  modified_base 9: mod_base = OTHER; note = 2'-OMe modified nucleotide
  modified_base 11: mod_base = OTHER; note = 2'-OMe modified nucleotide
  modified_base 12: mod_base = OTHER; note = 2'-OMe modified nucleotide
  modified_base 13: mod_base = OTHER; note = 2'-OMe modified nucleotide
  modified_base 15: mod_base = OTHER; note = 2'-OMe modified nucleotide
  modified_base 17: mod_base = OTHER; note = 2'-OMe modified nucleotide
  modified_base 19: mod_base = OTHER; note = 2'-OMe modified nucleotide
  modified_base 2: mod_base = OTHER; note = 2-deoxy-2-fluoro ribonucleotide
  modified_base 4: mod_base = OTHER; note = 2-deoxy-2-fluoro ribonucleotide
  modified_base 6: mod_base = OTHER; note = 2-deoxy-2-fluoro ribonucleotide
  modified_base 8: mod_base = OTHER; note = 2-deoxy-2-fluoro ribonucleotide
  modified_base 10: mod_base = OTHER; note = 2-deoxy-2-fluoro ribonucleotide
  modified_base 14: mod_base = OTHER; note = 2-deoxy-2-fluoro ribonucleotide
  modified_base 16: mod_base = OTHER; note = 2-deoxy-2-fluoro ribonucleotide
  modified_base 18: mod_base = OTHER; note = 2-deoxy-2-fluoro ribonucleotide
  modified_base 20..21: mod_base = OTHER; note = phosphorothioate internucleotide linkage
  modified_base 1: mod_base = OTHER; note = Thymine
  modified_base 20..21: mod_base = OTHER; note = Thymine
taggacacttgattctgtctt

SEQ ID NO: 507 - RNA, 21 nt, synthetic construct
  source 1..21: mol_type = other RNA
  modified_base 1: mod_base = OTHER; note = 2'-deoxy nucleotide
  modified_base 20..21: mod_base = OTHER; note = 2'-deoxy nucleotide
  modified_base 3: mod_base = OTHER; note = 2'-OMe modified nucleotide
  modified_base 5: mod_base = OTHER; note = 2'-OMe modified nucleotide
  modified_base 7: mod_base = OTHER; note = 2'-OMe modified nucleotide
  modified_base 9: mod_base = OTHER; note = 2'-OMe modified nucleotide
  modified_base 11: mod_base = OTHER; note = 2'-OMe modified nucleotide
  modified_base 12: mod_base = OTHER; note = 2'-OMe modified nucleotide
  modified_base 13: mod_base = OTHER; note = 2'-OMe modified nucleotide
  modified_base 15: mod_base = OTHER; note = 2'-OMe modified nucleotide
  modified_base 17: mod_base = OTHER; note = 2'-OMe modified nucleotide
  modified_base 19: mod_base = OTHER; note = 2'-OMe modified nucleotide
  modified_base 2: mod_base = OTHER; note = 2-deoxy-2-fluoro ribonucleotide
  modified_base 4: mod_base = OTHER; note = 2-deoxy-2-fluoro ribonucleotide
  modified_base 6: mod_base = OTHER; note = 2-deoxy-2-fluoro ribonucleotide
  modified_base 8: mod_base = OTHER; note = 2-deoxy-2-fluoro ribonucleotide
  modified_base 10: mod_base = OTHER; note = 2-deoxy-2-fluoro ribonucleotide
  modified_base 14: mod_base = OTHER; note = 2-deoxy-2-fluoro ribonucleotide
  modified_base 16: mod_base = OTHER; note = 2-deoxy-2-fluoro ribonucleotide
  modified_base 18: mod_base = OTHER; note = 2-deoxy-2-fluoro ribonucleotide
  modified_base 20..21: mod_base = OTHER; note = phosphorothioate internucleotide linkage
  modified_base 1: mod_base = OTHER; note = Thymine
  modified_base 20..21: mod_base = OTHER; note = Thymine
tggaccaagactgacatgttt

SEQ ID NO: 508 - RNA, 21 nt, synthetic construct
  source 1..21: mol_type = other RNA
  modified_base 1: mod_base = OTHER; note = 2'-deoxy nucleotide
  modified_base 20..21: mod_base = OTHER; note = 2'-deoxy nucleotide
  modified_base 3: mod_base = OTHER; note = 2'-OMe modified nucleotide
  modified_base 5: mod_base = OTHER; note = 2'-OMe modified nucleotide
  modified_base 7: mod_base = OTHER; note = 2'-OMe modified nucleotide
  modified_base 9: mod_base = OTHER; note = 2'-OMe modified nucleotide
  modified_base 11: mod_base = OTHER; note = 2'-OMe modified nucleotide
  modified_base 12: mod_base = OTHER; note = 2'-OMe modified nucleotide
  modified_base 13: mod_base = OTHER; note = 2'-OMe modified nucleotide
  modified_base 15: mod_base = OTHER; note = 2'-OMe modified nucleotide
  modified_base 17: mod_base = OTHER; note = 2'-OMe modified nucleotide
  modified_base 19: mod_base = OTHER; note = 2'-OMe modified nucleotide
  modified_base 2: mod_base = OTHER; note = 2-deoxy-2-fluoro ribonucleotide
  modified_base 4: mod_base = OTHER; note = 2-deoxy-2-fluoro ribonucleotide
  modified_base 6: mod_base = OTHER; note = 2-deoxy-2-fluoro ribonucleotide
  modified_base 8: mod_base = OTHER; note = 2-deoxy-2-fluoro ribonucleotide
  modified_base 10: mod_base = OTHER; note = 2-deoxy-2-fluoro ribonucleotide
  modified_base 14: mod_base = OTHER; note = 2-deoxy-2-fluoro ribonucleotide
  modified_base 16: mod_base = OTHER; note = 2-deoxy-2-fluoro ribonucleotide
  modified_base 18: mod_base = OTHER; note = 2-deoxy-2-fluoro ribonucleotide
  modified_base 20..21: mod_base = OTHER; note = phosphorothioate internucleotide linkage
  modified_base 1: mod_base = OTHER; note = Thymine
  modified_base 20..21: mod_base = OTHER; note = Thymine
tggtcaggccaccatttggtt

SEQ ID NO: 509 - RNA, 21 nt, synthetic construct
  source 1..21: mol_type = other RNA
  modified_base 1: mod_base = OTHER; note = 2'-deoxy nucleotide
  modified_base 20..21: mod_base = OTHER; note = 2'-deoxy nucleotide
  modified_base 3: mod_base = OTHER; note = 2'-OMe modified nucleotide
  modified_base 5: mod_base = OTHER; note = 2'-OMe modified nucleotide
  modified_base 7: mod_base = OTHER; note = 2'-OMe modified nucleotide
  modified_base 9: mod_base = OTHER; note = 2'-OMe modified nucleotide
  modified_base 11: mod_base = OTHER; note = 2'-OMe modified nucleotide
  modified_base 12: mod_base = OTHER; note = 2'-OMe modified nucleotide
  modified_base 13: mod_base = OTHER; note = 2'-OMe modified nucleotide
  modified_base 15: mod_base = OTHER; note = 2'-OMe modified nucleotide
  modified_base 17: mod_base = OTHER; note = 2'-OMe modified nucleotide
  modified_base 19: mod_base = OTHER; note = 2'-OMe modified nucleotide
  modified_base 2: mod_base = OTHER; note = 2-deoxy-2-fluoro ribonucleotide
  modified_base 4: mod_base = OTHER; note = 2-deoxy-2-fluoro ribonucleotide
  modified_base 6: mod_base = OTHER; note = 2-deoxy-2-fluoro ribonucleotide
  modified_base 8: mod_base = OTHER; note = 2-deoxy-2-fluoro ribonucleotide
  modified_base 10: mod_base = OTHER; note = 2-deoxy-2-fluoro ribonucleotide
  modified_base 14: mod_base = OTHER; note = 2-deoxy-2-fluoro ribonucleotide
  modified_base 16: mod_base = OTHER; note = 2-deoxy-2-fluoro ribonucleotide
  modified_base 18: mod_base = OTHER; note = 2-deoxy-2-fluoro ribonucleotide
  modified_base 20..21: mod_base = OTHER; note = phosphorothioate internucleotide linkage
  modified_base 1: mod_base = OTHER; note = Thymine
  modified_base 20..21: mod_base = OTHER; note = Thymine
tatccatggtataacaccatt

SEQ ID NO: 510 - RNA, 21 nt, synthetic construct
  source 1..21: mol_type = other RNA
  modified_base 1: mod_base = OTHER; note = 2'-deoxy nucleotide
  modified_base 20..21: mod_base = OTHER; note = 2'-deoxy nucleotide
  modified_base 3: mod_base = OTHER; note = 2'-OMe modified nucleotide
  modified_base 5: mod_base = OTHER; note = 2'-OMe modified nucleotide
  modified_base 7: mod_base = OTHER; note = 2'-OMe modified nucleotide
  modified_base 9: mod_base = OTHER; note = 2'-OMe modified nucleotide
  modified_base 11: mod_base = OTHER; note = 2'-OMe modified nucleotide
  modified_base 12: mod_base = OTHER; note = 2'-OMe modified nucleotide
  modified_base 13: mod_base = OTHER; note = 2'-OMe modified nucleotide
  modified_base 15: mod_base = OTHER; note = 2'-OMe modified nucleotide
  modified_base 17: mod_base = OTHER; note = 2'-OMe modified nucleotide
  modified_base 19: mod_base = OTHER; note = 2'-OMe modified nucleotide
  modified_base 2: mod_base = OTHER; note = 2-deoxy-2-fluoro ribonucleotide
  modified_base 4: mod_base = OTHER; note = 2-deoxy-2-fluoro ribonucleotide
  modified_base 6: mod_base = OTHER; note = 2-deoxy-2-fluoro ribonucleotide
  modified_base 8: mod_base = OTHER; note = 2-deoxy-2-fluoro ribonucleotide
  modified_base 10: mod_base = OTHER; note = 2-deoxy-2-fluoro ribonucleotide
  modified_base 14: mod_base = OTHER; note = 2-deoxy-2-fluoro ribonucleotide
  modified_base 16: mod_base = OTHER; note = 2-deoxy-2-fluoro ribonucleotide
  modified_base 18: mod_base = OTHER; note = 2-deoxy-2-fluoro ribonucleotide
  modified_base 20..21: mod_base = OTHER; note = phosphorothioate internucleotide linkage
  modified_base 1: mod_base = OTHER; note = Thymine
  modified_base 20..21: mod_base = OTHER; note = Thymine
tgggatccatggtataacatt

SEQ ID NO: 511 - RNA, 21 nt, synthetic construct
  source 1..21: mol_type = other RNA
  modified_base 1: mod_base = OTHER; note = 2'-deoxy nucleotide
  modified_base 20..21: mod_base = OTHER; note = 2'-deoxy nucleotide
  modified_base 3: mod_base = OTHER; note = 2'-OMe modified nucleotide
  modified_base 5: mod_base = OTHER; note = 2'-OMe modified nucleotide
  modified_base 7: mod_base = OTHER; note = 2'-OMe modified nucleotide
  modified_base 9: mod_base = OTHER; note = 2'-OMe modified nucleotide
  modified_base 11: mod_base = OTHER; note = 2'-OMe modified nucleotide
  modified_base 12: mod_base = OTHER; note = 2'-OMe modified nucleotide
  modified_base 13: mod_base = OTHER; note = 2'-OMe modified nucleotide
  modified_base 15: mod_base = OTHER; note = 2'-OMe modified nucleotide
  modified_base 17: mod_base = OTHER; note = 2'-OMe modified nucleotide
  modified_base 19: mod_base = OTHER; note = 2'-OMe modified nucleotide
  modified_base 2: mod_base = OTHER; note = 2-deoxy-2-fluoro ribonucleotide
  modified_base 4: mod_base = OTHER; note = 2-deoxy-2-fluoro ribonucleotide
  modified_base 6: mod_base = OTHER; note = 2-deoxy-2-fluoro ribonucleotide
  modified_base 8: mod_base = OTHER; note = 2-deoxy-2-fluoro ribonucleotide
  modified_base 10: mod_base = OTHER; note = 2-deoxy-2-fluoro ribonucleotide
  modified_base 14: mod_base = OTHER; note = 2-deoxy-2-fluoro ribonucleotide
  modified_base 16: mod_base = OTHER; note = 2-deoxy-2-fluoro ribonucleotide
  modified_base 18: mod_base = OTHER; note = 2-deoxy-2-fluoro ribonucleotide
  modified_base 20..21: mod_base = OTHER; note = phosphorothioate internucleotide linkage
  modified_base 1: mod_base = OTHER; note = Thymine
  modified_base 20..21: mod_base = OTHER; note = Thymine
ttggacattgtgtcaggtttt

SEQ ID NO: 512 - RNA, 21 nt, synthetic construct
  source 1..21: mol_type = other RNA
  modified_base 1: mod_base = OTHER; note = 2'-deoxy nucleotide
  modified_base 20..21: mod_base = OTHER; note = 2'-deoxy nucleotide
  modified_base 3: mod_base = OTHER; note = 2'-OMe modified nucleotide
  modified_base 5: mod_base = OTHER; note = 2'-OMe modified nucleotide
  modified_base 7: mod_base = OTHER; note = 2'-OMe modified nucleotide
  modified_base 9: mod_base = OTHER; note = 2'-OMe modified nucleotide
  modified_base 11: mod_base = OTHER; note = 2'-OMe modified nucleotide
  modified_base 12: mod_base = OTHER; note = 2'-OMe modified nucleotide
  modified_base 13: mod_base = OTHER; note = 2'-OMe modified nucleotide
  modified_base 15: mod_base = OTHER; note = 2'-OMe modified nucleotide
  modified_base 17: mod_base = OTHER; note = 2'-OMe modified nucleotide
  modified_base 19: mod_base = OTHER; note = 2'-OMe modified nucleotide
  modified_base 2: mod_base = OTHER; note = 2-deoxy-2-fluoro ribonucleotide
  modified_base 4: mod_base = OTHER; note = 2-deoxy-2-fluoro ribonucleotide
  modified_base 6: mod_base = OTHER; note = 2-deoxy-2-fluoro ribonucleotide
  modified_base 8: mod_base = OTHER; note = 2-deoxy-2-fluoro ribonucleotide
  modified_base 10: mod_base = OTHER; note = 2-deoxy-2-fluoro ribonucleotide
  modified_base 14: mod_base = OTHER; note = 2-deoxy-2-fluoro ribonucleotide
  modified_base 16: mod_base = OTHER; note = 2-deoxy-2-fluoro ribonucleotide
  modified_base 18: mod_base = OTHER; note = 2-deoxy-2-fluoro ribonucleotide
  modified_base 20..21: mod_base = OTHER; note = phosphorothioate internucleotide linkage
  modified_base 1: mod_base = OTHER; note = Thymine
  modified_base 20..21: mod_base = OTHER; note = Thymine
tattctgtcactggacatttt

SEQ ID NO: 513 - RNA, 21 nt, synthetic construct
  source 1..21: mol_type = other RNA
  modified_base 1: mod_base = OTHER; note = 2'-deoxy nucleotide
  modified_base 20..21: mod_base = OTHER; note = 2'-deoxy nucleotide
  modified_base 3: mod_base = OTHER; note = 2'-OMe modified nucleotide
  modified_base 5: mod_base = OTHER; note = 2'-OMe modified nucleotide
  modified_base 7: mod_base = OTHER; note = 2'-OMe modified nucleotide
  modified_base 9: mod_base = OTHER; note = 2'-OMe modified nucleotide
  modified_base 11: mod_base = OTHER; note = 2'-OMe modified nucleotide
  modified_base 12: mod_base = OTHER; note = 2'-OMe modified nucleotide
  modified_base 13: mod_base = OTHER; note = 2'-OMe modified nucleotide
  modified_base 15: mod_base = OTHER; note = 2'-OMe modified nucleotide
  modified_base 17: mod_base = OTHER; note = 2'-OMe modified nucleotide
  modified_base 19: mod_base = OTHER; note = 2'-OMe modified nucleotide
  modified_base 2: mod_base = OTHER; note = 2-deoxy-2-fluoro ribonucleotide
  modified_base 4: mod_base = OTHER; note = 2-deoxy-2-fluoro ribonucleotide
  modified_base 6: mod_base = OTHER; note = 2-deoxy-2-fluoro ribonucleotide
  modified_base 8: mod_base = OTHER; note = 2-deoxy-2-fluoro ribonucleotide
  modified_base 10: mod_base = OTHER; note = 2-deoxy-2-fluoro ribonucleotide
  modified_base 14: mod_base = OTHER; note = 2-deoxy-2-fluoro ribonucleotide
  modified_base 16: mod_base = OTHER; note = 2-deoxy-2-fluoro ribonucleotide
  modified_base 18: mod_base = OTHER; note = 2-deoxy-2-fluoro ribonucleotide
  modified_base 20..21: mod_base = OTHER; note = phosphorothioate internucleotide linkage
  modified_base 1: mod_base = OTHER; note = Thymine
  modified_base 20..21: mod_base = OTHER; note = Thymine
tggtgcttgttcagaaacatt

SEQ ID NO: 514 - RNA, 21 nt, synthetic construct
  source 1..21: mol_type = other RNA
  modified_base 1: mod_base = OTHER; note = 2'-deoxy nucleotide
  modified_base 20..21: mod_base = OTHER; note = 2'-deoxy nucleotide
  modified_base 3: mod_base = OTHER; note = 2'-OMe modified nucleotide
  modified_base 5: mod_base = OTHER; note = 2'-OMe modified nucleotide
  modified_base 7: mod_base = OTHER; note = 2'-OMe modified nucleotide
  modified_base 9: mod_base = OTHER; note = 2'-OMe modified nucleotide
  modified_base 11: mod_base = OTHER; note = 2'-OMe modified nucleotide
  modified_base 12: mod_base = OTHER; note = 2'-OMe modified nucleotide
  modified_base 13: mod_base = OTHER; note = 2'-OMe modified nucleotide
  modified_base 15: mod_base = OTHER; note = 2'-OMe modified nucleotide
  modified_base 17: mod_base = OTHER; note = 2'-OMe modified nucleotide
  modified_base 19: mod_base = OTHER; note = 2'-OMe modified nucleotide
  modified_base 2: mod_base = OTHER; note = 2-deoxy-2-fluoro ribonucleotide
  modified_base 4: mod_base = OTHER; note = 2-deoxy-2-fluoro ribonucleotide
  modified_base 6: mod_base = OTHER; note = 2-deoxy-2-fluoro ribonucleotide
  modified_base 8: mod_base = OTHER; note = 2-deoxy-2-fluoro ribonucleotide
  modified_base 10: mod_base = OTHER; note = 2-deoxy-2-fluoro ribonucleotide
  modified_base 14: mod_base = OTHER; note = 2-deoxy-2-fluoro ribonucleotide
  modified_base 16: mod_base = OTHER; note = 2-deoxy-2-fluoro ribonucleotide
  modified_base 18: mod_base = OTHER; note = 2-deoxy-2-fluoro ribonucleotide
  modified_base 20..21: mod_base = OTHER; note = phosphorothioate internucleotide linkage
  modified_base 1: mod_base = OTHER; note = Thymine
  modified_base 20..21: mod_base = OTHER; note = Thymine
tggagaatgagcctcgatatt

SEQ ID NO: 515 - RNA, 21 nt, synthetic construct
  source 1..21: mol_type = other RNA
  modified_base 1: mod_base = OTHER; note = 2'-deoxy nucleotide
  modified_base 20..21: mod_base = OTHER; note = 2'-deoxy nucleotide
  modified_base 3: mod_base = OTHER; note = 2'-OMe modified nucleotide
  modified_base 5: mod_base = OTHER; note = 2'-OMe modified nucleotide
  modified_base 7: mod_base = OTHER; note = 2'-OMe modified nucleotide
  modified_base 9: mod_base = OTHER; note = 2'-OMe modified nucleotide
  modified_base 11: mod_base = OTHER; note = 2'-OMe modified nucleotide
  modified_base 12: mod_base = OTHER; note = 2'-OMe modified nucleotide
  modified_base 13: mod_base = OTHER; note = 2'-OMe modified nucleotide
  modified_base 15: mod_base = OTHER; note = 2'-OMe modified nucleotide
  modified_base 17: mod_base = OTHER; note = 2'-OMe modified nucleotide
  modified_base 19: mod_base = OTHER; note = 2'-OMe modified nucleotide
  modified_base 2: mod_base = OTHER; note = 2-deoxy-2-fluoro ribonucleotide
  modified_base 4: mod_base = OTHER; note = 2-deoxy-2-fluoro ribonucleotide
  modified_base 6: mod_base = OTHER; note = 2-deoxy-2-fluoro ribonucleotide
  modified_base 8: mod_base = OTHER; note = 2-deoxy-2-fluoro ribonucleotide
  modified_base 10: mod_base = OTHER; note = 2-deoxy-2-fluoro ribonucleotide
  modified_base 14: mod_base = OTHER; note = 2-deoxy-2-fluoro ribonucleotide
  modified_base 16: mod_base = OTHER; note = 2-deoxy-2-fluoro ribonucleotide
  modified_base 18: mod_base = OTHER; note = 2-deoxy-2-fluoro ribonucleotide
  modified_base 20..21: mod_base = OTHER; note = phosphorothioate internucleotide linkage
  modified_base 1: mod_base = OTHER; note = Thymine
  modified_base 20..21: mod_base = OTHER; note = Thymine
tgtggagaatgagcctcgatt

SEQ ID NO: 516 - RNA, 21 nt, synthetic construct
  source 1..21: mol_type = other RNA
  modified_base 1: mod_base = OTHER; note = 2'-deoxy nucleotide
  modified_base 20..21: mod_base = OTHER; note = 2'-deoxy nucleotide
  modified_base 3: mod_base = OTHER; note = 2'-OMe modified nucleotide
  modified_base 5: mod_base = OTHER; note = 2'-OMe modified nucleotide
  modified_base 7: mod_base = OTHER; note = 2'-OMe modified nucleotide
  modified_base 9: mod_base = OTHER; note = 2'-OMe modified nucleotide
  modified_base 11: mod_base = OTHER; note = 2'-OMe modified nucleotide
  modified_base 12: mod_base = OTHER; note = 2'-OMe modified nucleotide
  modified_base 13: mod_base = OTHER; note = 2'-OMe modified nucleotide
  modified_base 15: mod_base = OTHER; note = 2'-OMe modified nucleotide
  modified_base 17: mod_base = OTHER; note = 2'-OMe modified nucleotide
  modified_base 19: mod_base = OTHER; note = 2'-OMe modified nucleotide
  modified_base 2: mod_base = OTHER; note = 2-deoxy-2-fluoro ribonucleotide
  modified_base 4: mod_base = OTHER; note = 2-deoxy-2-fluoro ribonucleotide
  modified_base 6: mod_base = OTHER; note = 2-deoxy-2-fluoro ribonucleotide
  modified_base 8: mod_base = OTHER; note = 2-deoxy-2-fluoro ribonucleotide
  modified_base 10: mod_base = OTHER; note = 2-deoxy-2-fluoro ribonucleotide
  modified_base 14: mod_base = OTHER; note = 2-deoxy-2-fluoro ribonucleotide
  modified_base 16: mod_base = OTHER; note = 2-deoxy-2-fluoro ribonucleotide
  modified_base 18: mod_base = OTHER; note = 2-deoxy-2-fluoro ribonucleotide
  modified_base 20..21: mod_base = OTHER; note = phosphorothioate internucleotide linkage
  modified_base 1: mod_base = OTHER; note = Thymine
  modified_base 20..21: mod_base = OTHER; note = Thymine
tccgtgggagttgtgaggatt

SEQ ID NO: 517 - RNA, 21 nt, synthetic construct
  source 1..21: mol_type = other RNA
  modified_base 1: mod_base = OTHER; note = 2'-deoxy nucleotide
  modified_base 20..21: mod_base = OTHER; note = 2'-deoxy nucleotide
  modified_base 3: mod_base = OTHER; note = 2'-OMe modified nucleotide
  modified_base 5: mod_base = OTHER; note = 2'-OMe modified nucleotide
  modified_base 7: mod_base = OTHER; note = 2'-OMe modified nucleotide
  modified_base 9: mod_base = OTHER; note = 2'-OMe modified nucleotide
  modified_base 11: mod_base = OTHER; note = 2'-OMe modified nucleotide
  modified_base 12: mod_base = OTHER; note = 2'-OMe modified nucleotide
  modified_base 13: mod_base = OTHER; note = 2'-OMe modified nucleotide
  modified_base 15: mod_base = OTHER; note = 2'-OMe modified nucleotide
  modified_base 17: mod_base = OTHER; note = 2'-OMe modified nucleotide
  modified_base 19: mod_base = OTHER; note = 2'-OMe modified nucleotide
  modified_base 2: mod_base = OTHER; note = 2-deoxy-2-fluoro ribonucleotide
  modified_base 4: mod_base = OTHER; note = 2-deoxy-2-fluoro ribonucleotide
  modified_base 6: mod_base = OTHER; note = 2-deoxy-2-fluoro ribonucleotide
  modified_base 8: mod_base = OTHER; note = 2-deoxy-2-fluoro ribonucleotide
  modified_base 10: mod_base = OTHER; note = 2-deoxy-2-fluoro ribonucleotide
  modified_base 14: mod_base = OTHER; note = 2-deoxy-2-fluoro ribonucleotide
  modified_base 16: mod_base = OTHER; note = 2-deoxy-2-fluoro ribonucleotide
  modified_base 18: mod_base = OTHER; note = 2-deoxy-2-fluoro ribonucleotide
  modified_base 20..21: mod_base = OTHER; note = phosphorothioate internucleotide linkage
  modified_base 1: mod_base = OTHER; note = Thymine
  modified_base 20..21: mod_base = OTHER; note = Thymine
tggaccaccgtgggagttgtt

SEQ ID NO: 518 - RNA, 21 nt, synthetic construct
  source 1..21: mol_type = other RNA
  modified_base 1: mod_base = OTHER; note = 2'-deoxy nucleotide
  modified_base 20..21: mod_base = OTHER; note = 2'-deoxy nucleotide
  modified_base 3: mod_base = OTHER; note = 2'-OMe modified nucleotide
  modified_base 5: mod_base = OTHER; note = 2'-OMe modified nucleotide
  modified_base 7: mod_base = OTHER; note = 2'-OMe modified nucleotide
  modified_base 9: mod_base = OTHER; note = 2'-OMe modified nucleotide
  modified_base 11: mod_base = OTHER; note = 2'-OMe modified nucleotide
  modified_base 12: mod_base = OTHER; note = 2'-OMe modified nucleotide
  modified_base 13: mod_base = OTHER; note = 2'-OMe modified nucleotide
  modified_base 15: mod_base = OTHER; note = 2'-OMe modified nucleotide
  modified_base 17: mod_base = OTHER; note = 2'-OMe modified nucleotide
  modified_base 19: mod_base = OTHER; note = 2'-OMe modified nucleotide
  modified_base 2: mod_base = OTHER; note = 2-deoxy-2-fluoro ribonucleotide
  modified_base 4: mod_base = OTHER; note = 2-deoxy-2-fluoro ribonucleotide
  modified_base 6: mod_base = OTHER; note = 2-deoxy-2-fluoro ribonucleotide
  modified_base 8: mod_base = OTHER; note = 2-deoxy-2-fluoro ribonucleotide
  modified_base 10: mod_base = OTHER; note = 2-deoxy-2-fluoro ribonucleotide
  modified_base 14: mod_base = OTHER; note = 2-deoxy-2-fluoro ribonucleotide
  modified_base 16: mod_base = OTHER; note = 2-deoxy-2-fluoro ribonucleotide
  modified_base 18: mod_base = OTHER; note = 2-deoxy-2-fluoro ribonucleotide
  modified_base 20..21: mod_base = OTHER; note = phosphorothioate internucleotide linkage
  modified_base 1: mod_base = OTHER; note = Thymine
  modified_base 20..21: mod_base = OTHER; note = Thymine
ttgcttgttcagaaggagctt

SEQ ID NO: 519 - RNA, 21 nt, synthetic construct
  source 1..21: mol_type = other RNA
  modified_base 1: mod_base = OTHER; note = 2'-deoxy nucleotide
  modified_base 20..21: mod_base = OTHER; note = 2'-deoxy nucleotide
  modified_base 3: mod_base = OTHER; note = 2'-OMe modified nucleotide
  modified_base 5: mod_base = OTHER; note = 2'-OMe modified nucleotide
  modified_base 7: mod_base = OTHER; note = 2'-OMe modified nucleotide
  modified_base 9: mod_base = OTHER; note = 2'-OMe modified nucleotide
  modified_base 11: mod_base = OTHER; note = 2'-OMe modified nucleotide
  modified_base 12: mod_base = OTHER; note = 2'-OMe modified nucleotide
  modified_base 13: mod_base = OTHER; note = 2'-OMe modified nucleotide
  modified_base 15: mod_base = OTHER; note = 2'-OMe modified nucleotide
  modified_base 17: mod_base = OTHER; note = 2'-OMe modified nucleotide
  modified_base 19: mod_base = OTHER; note = 2'-OMe modified nucleotide
  modified_base 2: mod_base = OTHER; note = 2-deoxy-2-fluoro ribonucleotide
  modified_base 4: mod_base = OTHER; note = 2-deoxy-2-fluoro ribonucleotide
  modified_base 6: mod_base = OTHER; note = 2-deoxy-2-fluoro ribonucleotide
  modified_base 8: mod_base = OTHER; note = 2-deoxy-2-fluoro ribonucleotide
  modified_base 10: mod_base = OTHER; note = 2-deoxy-2-fluoro ribonucleotide
  modified_base 14: mod_base = OTHER; note = 2-deoxy-2-fluoro ribonucleotide
  modified_base 16: mod_base = OTHER; note = 2-deoxy-2-fluoro ribonucleotide
  modified_base 18: mod_base = OTHER; note = 2-deoxy-2-fluoro ribonucleotide
  modified_base 20..21: mod_base = OTHER; note = phosphorothioate internucleotide linkage
  modified_base 1: mod_base = OTHER; note = Thymine
  modified_base 20..21: mod_base = OTHER; note = Thymine
tctgatgccagtgtggtattt

SEQ ID NO: 520 - RNA, 21 nt, synthetic construct
  source 1..21: mol_type = other RNA
  modified_base 1: mod_base = OTHER; note = 2'-deoxy nucleotide
  modified_base 20..21: mod_base = OTHER; note = 2'-deoxy nucleotide
  modified_base 3: mod_base = OTHER; note = 2'-OMe modified nucleotide
  modified_base 5: mod_base = OTHER; note = 2'-OMe modified nucleotide
  modified_base 7: mod_base = OTHER; note = 2'-OMe modified nucleotide
  modified_base 9: mod_base = OTHER; note = 2'-OMe modified nucleotide
  modified_base 11: mod_base = OTHER; note = 2'-OMe modified nucleotide
  modified_base 12: mod_base = OTHER; note = 2'-OMe modified nucleotide
  modified_base 13: mod_base = OTHER; note = 2'-OMe modified nucleotide
  modified_base 15: mod_base = OTHER; note = 2'-OMe modified nucleotide
  modified_base 17: mod_base = OTHER; note = 2'-OMe modified nucleotide
  modified_base 19: mod_base = OTHER; note = 2'-OMe modified nucleotide
  modified_base 2: mod_base = OTHER; note = 2-deoxy-2-fluoro ribonucleotide
  modified_base 4: mod_base = OTHER; note = 2-deoxy-2-fluoro ribonucleotide
  modified_base 6: mod_base = OTHER; note = 2-deoxy-2-fluoro ribonucleotide
  modified_base 8: mod_base = OTHER; note = 2-deoxy-2-fluoro ribonucleotide
  modified_base 10: mod_base = OTHER; note = 2-deoxy-2-fluoro ribonucleotide
  modified_base 14: mod_base = OTHER; note = 2-deoxy-2-fluoro ribonucleotide
  modified_base 16: mod_base = OTHER; note = 2-deoxy-2-fluoro ribonucleotide
  modified_base 18: mod_base = OTHER; note = 2-deoxy-2-fluoro ribonucleotide
  modified_base 20..21: mod_base = OTHER; note = phosphorothioate internucleotide linkage
  modified_base 1: mod_base = OTHER; note = Thymine
  modified_base 20..21: mod_base = OTHER; note = Thymine
ttaggacacctgattctgttt

SEQ ID NO: 521 - RNA, 21 nt, synthetic construct
  source 1..21: mol_type = other RNA
  modified_base 1: mod_base = OTHER; note = 2'-deoxy nucleotide
  modified_base 20..21: mod_base = OTHER; note = 2'-deoxy nucleotide
  modified_base 3: mod_base = OTHER; note = 2'-OMe modified nucleotide
  modified_base 5: mod_base = OTHER; note = 2'-OMe modified nucleotide
  modified_base 7: mod_base = OTHER; note = 2'-OMe modified nucleotide
  modified_base 9: mod_base = OTHER; note = 2'-OMe modified nucleotide
  modified_base 11: mod_base = OTHER; note = 2'-OMe modified nucleotide
  modified_base 12: mod_base = OTHER; note = 2'-OMe modified nucleotide
  modified_base 13: mod_base = OTHER; note = 2'-OMe modified nucleotide
  modified_base 15: mod_base = OTHER; note = 2'-OMe modified nucleotide
  modified_base 17: mod_base = OTHER; note = 2'-OMe modified nucleotide
  modified_base 19: mod_base = OTHER; note = 2'-OMe modified nucleotide
  modified_base 2: mod_base = OTHER; note = 2-deoxy-2-fluoro ribonucleotide
  modified_base 4: mod_base = OTHER; note = 2-deoxy-2-fluoro ribonucleotide
  modified_base 6: mod_base = OTHER; note = 2-deoxy-2-fluoro ribonucleotide
  modified_base 8: mod_base = OTHER; note = 2-deoxy-2-fluoro ribonucleotide
  modified_base 10: mod_base = OTHER; note = 2-deoxy-2-fluoro ribonucleotide
  modified_base 14: mod_base = OTHER; note = 2-deoxy-2-fluoro ribonucleotide
  modified_base 16: mod_base = OTHER; note = 2-deoxy-2-fluoro ribonucleotide
  modified_base 18: mod_base = OTHER; note = 2-deoxy-2-fluoro ribonucleotide
  modified_base 20..21: mod_base = OTHER; note = phosphorothioate internucleotide linkage
  modified_base 1: mod_base = OTHER; note = Thymine
  modified_base 20..21: mod_base = OTHER; note = Thymine
tctctaggacacctgattctt

SEQ ID NO: 522 - RNA, 21 nt, synthetic construct
  source 1..21: mol_type = other RNA
  modified_base 1: mod_base = OTHER; note = 2'-deoxy nucleotide
  modified_base 20..21: mod_base = OTHER; note = 2'-deoxy nucleotide
  modified_base 3: mod_base = OTHER; note = 2'-OMe modified nucleotide
  modified_base 5: mod_base = OTHER; note = 2'-OMe modified nucleotide
  modified_base 7: mod_base = OTHER; note = 2'-OMe modified nucleotide
  modified_base 9: mod_base = OTHER; note = 2'-OMe modified nucleotide
  modified_base 11: mod_base = OTHER; note = 2'-OMe modified nucleotide
  modified_base 12: mod_base = OTHER; note = 2'-OMe modified nucleotide
  modified_base 13: mod_base = OTHER; note = 2'-OMe modified nucleotide
  modified_base 15: mod_base = OTHER; note = 2'-OMe modified nucleotide
  modified_base 17: mod_base = OTHER; note = 2'-OMe modified nucleotide
  modified_base 19: mod_base = OTHER; note = 2'-OMe modified nucleotide
  modified_base 2: mod_base = OTHER; note = 2-deoxy-2-fluoro ribonucleotide
  modified_base 4: mod_base = OTHER; note = 2-deoxy-2-fluoro ribonucleotide
  modified_base 6: mod_base = OTHER; note = 2-deoxy-2-fluoro ribonucleotide
  modified_base 8: mod_base = OTHER; note = 2-deoxy-2-fluoro ribonucleotide
  modified_base 10: mod_base = OTHER; note = 2-deoxy-2-fluoro ribonucleotide
  modified_base 14: mod_base = OTHER; note = 2-deoxy-2-fluoro ribonucleotide
  modified_base 16: mod_base = OTHER; note = 2-deoxy-2-fluoro ribonucleotide
  modified_base 18: mod_base = OTHER; note = 2-deoxy-2-fluoro ribonucleotide
  modified_base 20..21: mod_base = OTHER; note = phosphorothioate internucleotide linkage
  modified_base 1: mod_base = OTHER; note = Thymine
  modified_base 20..21: mod_base = OTHER; note = Thymine
ttctctaggacacctgatttt

SEQ ID NO: 523 - RNA, 21 nt, synthetic construct
  source 1..21: mol_type = other RNA
  modified_base 1: mod_base = OTHER; note = 2'-deoxy nucleotide
  modified_base 20..21: mod_base = OTHER; note = 2'-deoxy nucleotide
  modified_base 3: mod_base = OTHER; note = 2'-OMe modified nucleotide
  modified_base 5: mod_base = OTHER; note = 2'-OMe modified nucleotide
  modified_base 7: mod_base = OTHER; note = 2'-OMe modified nucleotide
  modified_base 9: mod_base = OTHER; note = 2'-OMe modified nucleotide
  modified_base 11: mod_base = OTHER; note = 2'-OMe modified nucleotide
  modified_base 12: mod_base = OTHER; note = 2'-OMe modified nucleotide
  modified_base 13: mod_base = OTHER; note = 2'-OMe modified nucleotide
  modified_base 15: mod_base = OTHER; note = 2'-OMe modified nucleotide
  modified_base 17: mod_base = OTHER; note = 2'-OMe modified nucleotide
  modified_base 19: mod_base = OTHER; note = 2'-OMe modified nucleotide
  modified_base 2: mod_base = OTHER; note = 2-deoxy-2-fluoro ribonucleotide
  modified_base 4: mod_base = OTHER; note = 2-deoxy-2-fluoro ribonucleotide
  modified_base 6: mod_base = OTHER; note = 2-deoxy-2-fluoro ribonucleotide
  modified_base 8: mod_base = OTHER; note = 2-deoxy-2-fluoro ribonucleotide
  modified_base 10: mod_base = OTHER; note = 2-deoxy-2-fluoro ribonucleotide
  modified_base 14: mod_base = OTHER; note = 2-deoxy-2-fluoro ribonucleotide
  modified_base 16: mod_base = OTHER; note = 2-deoxy-2-fluoro ribonucleotide
  modified_base 18: mod_base = OTHER; note = 2-deoxy-2-fluoro ribonucleotide
  modified_base 20..21: mod_base = OTHER; note = phosphorothioate internucleotide linkage
  modified_base 1: mod_base = OTHER; note = Thymine
  modified_base 20..21: mod_base = OTHER; note = Thymine
tgtctctaggacacctgattt

SEQ ID NO: 524 - RNA, 26 nt, synthetic construct
  source 1..26: mol_type = other RNA
  modified_base 1: mod_base = OTHER; note = 2'-deoxy nucleotide
  modified_base 3: mod_base = OTHER; note = 2'-OMe modified nucleotide
  modified_base 5: mod_base = OTHER; note = 2'-OMe modified nucleotide
  modified_base 7: mod_base = OTHER; note = 2'-OMe modified nucleotide
  modified_base 9: mod_base = OTHER; note = 2'-OMe modified nucleotide
  modified_base 11: mod_base = OTHER; note = 2'-OMe modified nucleotide
  modified_base 13: mod_base = OTHER; note = 2'-OMe modified nucleotide
  modified_base 15: mod_base = OTHER; note = 2'-OMe modified nucleotide
  modified_base 17: mod_base = OTHER; note = 2'-OMe modified nucleotide
  modified_base 19: mod_base = OTHER; note = 2'-OMe modified nucleotide
  modified_base 21: mod_base = OTHER; note = 2'-OMe modified nucleotide
  modified_base 23: mod_base = OTHER; note = 2'-OMe modified nucleotide
  modified_base 24: mod_base = OTHER; note = 2'-OMe modified nucleotide
  modified_base 26: mod_base = OTHER; note = 2'-OMe modified nucleotide
  modified_base 2: mod_base = OTHER; note = 2-deoxy-2-fluoro ribonucleotide
  modified_base 4: mod_base = OTHER; note = 2-deoxy-2-fluoro ribonucleotide
  modified_base 6: mod_base = OTHER; note = 2-deoxy-2-fluoro ribonucleotide
  modified_base 8: mod_base = OTHER; note = 2-deoxy-2-fluoro ribonucleotide
  modified_base 10: mod_base = OTHER; note = 2-deoxy-2-fluoro ribonucleotide
  modified_base 12: mod_base = OTHER; note = 2-deoxy-2-fluoro ribonucleotide
  modified_base 14: mod_base = OTHER; note = 2-deoxy-2-fluoro ribonucleotide
  modified_base 16: mod_base = OTHER; note = 2-deoxy-2-fluoro ribonucleotide
  modified_base 18: mod_base = OTHER; note = 2-deoxy-2-fluoro ribonucleotide
  modified_base 20: mod_base = OTHER; note = 2-deoxy-2-fluoro ribonucleotide
  modified_base 22: mod_base = OTHER; note = 2-deoxy-2-fluoro ribonucleotide
  modified_base 1..2: mod_base = OTHER; note = phosphorothioate internucleotide linkage
  modified_base 2..3: mod_base = OTHER; note = phosphorothioate internucleotide linkage
  modified_base 22..23: mod_base = OTHER; note = phosphorothioate internucleotide linkage
  modified_base 23..24: mod_base = OTHER; note = phosphorothioate internucleotide linkage
  modified_base 1: mod_base = OTHER; note = Thymine
tgagaatgagcctcgataactcttat

SEQ ID NO: 525 - RNA, 26 nt, synthetic construct
  source 1..26: mol_type = other RNA
  modified_base 1: mod_base = OTHER; note = 2'-deoxy nucleotide
  modified_base 3: mod_base = OTHER; note = 2'-OMe modified nucleotide
  modified_base 5: mod_base = OTHER; note = 2'-OMe modified nucleotide
  modified_base 7: mod_base = OTHER; note = 2'-OMe modified nucleotide
  modified_base 9: mod_base = OTHER; note = 2'-OMe modified nucleotide
  modified_base 11: mod_base = OTHER; note = 2'-OMe modified nucleotide
  modified_base 12: mod_base = OTHER; note = 2'-OMe modified nucleotide
  modified_base 15: mod_base = OTHER; note = 2'-OMe modified nucleotide
  modified_base 17: mod_base = OTHER; note = 2'-OMe modified nucleotide
  modified_base 19: mod_base = OTHER; note = 2'-OMe modified nucleotide
  modified_base 21: mod_base = OTHER; note = 2'-OMe modified nucleotide
  modified_base 23: mod_base = OTHER; note = 2'-OMe modified nucleotide
  modified_base 24: mod_base = OTHER; note = 2'-OMe modified nucleotide
  modified_base 26: mod_base = OTHER; note = 2'-OMe modified nucleotide
  modified_base 2: mod_base = OTHER; note = 2-deoxy-2-fluoro ribonucleotide
  modified_base 4: mod_base = OTHER; note = 2-deoxy-2-fluoro ribonucleotide
  modified_base 6: mod_base = OTHER; note = 2-deoxy-2-fluoro ribonucleotide
  modified_base 8: mod_base = OTHER; note = 2-deoxy-2-fluoro ribonucleotide
  modified_base 10: mod_base = OTHER; note = 2-deoxy-2-fluoro ribonucleotide
  modified_base 13..14: mod_base = OTHER; note = 2-deoxy-2-fluoro ribonucleotide
  modified_base 16: mod_base = OTHER; note = 2-deoxy-2-fluoro ribonucleotide
  modified_base 18: mod_base = OTHER; note = 2-deoxy-2-fluoro ribonucleotide
  modified_base 20: mod_base = OTHER; note = 2-deoxy-2-fluoro ribonucleotide
  modified_base 22: mod_base = OTHER; note = 2-deoxy-2-fluoro ribonucleotide
  modified_base 1..2: mod_base = OTHER; note = phosphorothioate internucleotide linkage
  modified_base 2..3: mod_base = OTHER; note = phosphorothioate internucleotide linkage
  modified_base 22..23: mod_base = OTHER; note = phosphorothioate internucleotide linkage
  modified_base 23..24: mod_base = OTHER; note = phosphorothioate internucleotide linkage
  modified_base 1: mod_base = OTHER; note = Thymine
tgagaatgagcctcgataactcttat

SEQ ID NO: 526 - RNA, 26 nt, synthetic construct
  source 1..26: mol_type = other RNA
  modified_base 1: mod_base = OTHER; note = 2'-deoxy nucleotide
  modified_base 3: mod_base = OTHER; note = 2'-OMe modified nucleotide
  modified_base 5: mod_base = OTHER; note = 2'-OMe modified nucleotide
  modified_base 7: mod_base = OTHER; note = 2'-OMe modified nucleotide
  modified_base 9: mod_base = OTHER; note = 2'-OMe modified nucleotide
  modified_base 11: mod_base = OTHER; note = 2'-OMe modified nucleotide
  modified_base 12: mod_base = OTHER; note = 2'-OMe modified nucleotide
  modified_base 14: mod_base = OTHER; note = 2'-OMe modified nucleotide
  modified_base 15: mod_base = OTHER; note = 2'-OMe modified nucleotide
  modified_base 17: mod_base = OTHER; note = 2'-OMe modified nucleotide
  modified_base 19: mod_base = OTHER; note = 2'-OMe modified nucleotide
  modified_base 21: mod_base = OTHER; note = 2'-OMe modified nucleotide
  modified_base 23: mod_base = OTHER; note = 2'-OMe modified nucleotide
  modified_base 24: mod_base = OTHER; note = 2'-OMe modified nucleotide
  modified_base 26: mod_base = OTHER; note = 2'-OMe modified nucleotide
  modified_base 2: mod_base = OTHER; note = 2-deoxy-2-fluoro ribonucleotide
  modified_base 4: mod_base = OTHER; note = 2-deoxy-2-fluoro ribonucleotide
  modified_base 6: mod_base = OTHER; note = 2-deoxy-2-fluoro ribonucleotide
  modified_base 8: mod_base = OTHER; note = 2-deoxy-2-fluoro ribonucleotide
  modified_base 10: mod_base = OTHER; note = 2-deoxy-2-fluoro ribonucleotide
  modified_base 13: mod_base = OTHER; note = 2-deoxy-2-fluoro ribonucleotide
  modified_base 16: mod_base = OTHER; note = 2-deoxy-2-fluoro ribonucleotide
  modified_base 18: mod_base = OTHER; note = 2-deoxy-2-fluoro ribonucleotide
  modified_base 20: mod_base = OTHER; note = 2-deoxy-2-fluoro ribonucleotide
  modified_base 22: mod_base = OTHER; note = 2-deoxy-2-fluoro ribonucleotide
  modified_base 1..2: mod_base = OTHER; note = phosphorothioate internucleotide linkage
  modified_base 2..3: mod_base = OTHER; note = phosphorothioate internucleotide linkage
  modified_base 22..23: mod_base = OTHER; note = phosphorothioate internucleotide linkage
  modified_base 23..24: mod_base = OTHER; note = phosphorothioate internucleotide linkage
  modified_base 1: mod_base = OTHER; note = Thymine
tgagaatgagcctcgataactcttat

SEQ ID NO: 527 - RNA, 26 nt, synthetic construct
  source 1..26: mol_type = other RNA
  modified_base 1: mod_base = OTHER; note = 2'-deoxy nucleotide
  modified_base 3: mod_base = OTHER; note = 2'-OMe modified nucleotide
  modified_base 5: mod_base = OTHER; note = 2'-OMe modified nucleotide
  modified_base 7: mod_base = OTHER; note = 2'-OMe modified nucleotide
  modified_base 9: mod_base = OTHER; note = 2'-OMe modified nucleotide
  modified_base 11: mod_base = OTHER; note = 2'-OMe modified nucleotide
  modified_base 14: mod_base = OTHER; note = 2'-OMe modified nucleotide
  modified_base 16: mod_base = OTHER; note = 2'-OMe modified nucleotide
  modified_base 18: mod_base = OTHER; note = 2'-OMe modified nucleotide
  modified_base 20: mod_base = OTHER; note = 2'-OMe modified nucleotide
  modified_base 22: mod_base = OTHER; note = 2'-OMe modified nucleotide
  modified_base 24: mod_base = OTHER; note = 2'-OMe modified nucleotide
  modified_base 26: mod_base = OTHER; note = 2'-OMe modified nucleotide
  modified_base 2: mod_base = OTHER; note = 2-deoxy-2-fluoro ribonucleotide
  modified_base 4: mod_base = OTHER; note = 2-deoxy-2-fluoro ribonucleotide
  modified_base 6: mod_base = OTHER; note = 2-deoxy-2-fluoro ribonucleotide
  modified_base 8: mod_base = OTHER; note = 2-deoxy-2-fluoro ribonucleotide
  modified_base 10: mod_base = OTHER; note = 2-deoxy-2-fluoro ribonucleotide
  modified_base 12..13: mod_base = OTHER; note = 2-deoxy-2-fluoro ribonucleotide
  modified_base 15: mod_base = OTHER; note = 2-deoxy-2-fluoro ribonucleotide
  modified_base 17: mod_base = OTHER; note = 2-deoxy-2-fluoro ribonucleotide
  modified_base 19: mod_base = OTHER; note = 2-deoxy-2-fluoro ribonucleotide
  modified_base 21: mod_base = OTHER; note = 2-deoxy-2-fluoro ribonucleotide
  modified_base 23: mod_base = OTHER; note = 2-deoxy-2-fluoro ribonucleotide
  modified_base 1..2: mod_base = OTHER; note = phosphorothioate internucleotide linkage
  modified_base 2..3: mod_base = OTHER; note = phosphorothioate internucleotide linkage
  modified_base 22..23: mod_base = OTHER; note = phosphorothioate internucleotide linkage
  modified_base 23..24: mod_base = OTHER; note = phosphorothioate internucleotide linkage
  modified_base 1: mod_base = OTHER; note = Thymine
tgagaatgagcctcgataactcttat

SEQ ID NO: 528 - RNA, 26 nt, synthetic construct
  source 1..26: mol_type = other RNA
  modified_base 1: mod_base = OTHER; note = 2'-deoxy nucleotide
  modified_base 3: mod_base = OTHER; note = 2'-OMe modified nucleotide
  modified_base 5: mod_base = OTHER; note = 2'-OMe modified nucleotide
  modified_base 7: mod_base = OTHER; note = 2'-OMe modified nucleotide
  modified_base 9: mod_base = OTHER; note = 2'-OMe modified nucleotide
  modified_base 11: mod_base = OTHER; note = 2'-OMe modified nucleotide
  modified_base 13: mod_base = OTHER; note = 2'-OMe modified nucleotide
  modified_base 15: mod_base = OTHER; note = 2'-OMe modified nucleotide
  modified_base 17: mod_base = OTHER; note = 2'-OMe modified nucleotide
  modified_base 19: mod_base = OTHER; note = 2'-OMe modified nucleotide
  modified_base 21: mod_base = OTHER; note = 2'-OMe modified nucleotide
  modified_base 23: mod_base = OTHER; note = 2'-OMe modified nucleotide
  modified_base 24: mod_base = OTHER; note = 2'-OMe modified nucleotide
  modified_base 26: mod_base = OTHER; note = 2'-OMe modified nucleotide
  modified_base 2: mod_base = OTHER; note = 2-deoxy-2-fluoro ribonucleotide
  modified_base 4: mod_base = OTHER; note = 2-deoxy-2-fluoro ribonucleotide
  modified_base 6: mod_base = OTHER; note = 2-deoxy-2-fluoro ribonucleotide
  modified_base 8: mod_base = OTHER; note = 2-deoxy-2-fluoro ribonucleotide
  modified_base 10: mod_base = OTHER; note = 2-deoxy-2-fluoro ribonucleotide
  modified_base 12: mod_base = OTHER; note = 2-deoxy-2-fluoro ribonucleotide
  modified_base 14: mod_base = OTHER; note = 2-deoxy-2-fluoro ribonucleotide
  modified_base 16: mod_base = OTHER; note = 2-deoxy-2-fluoro ribonucleotide
  modified_base 18: mod_base = OTHER; note = 2-deoxy-2-fluoro ribonucleotide
  modified_base 20: mod_base = OTHER; note = 2-deoxy-2-fluoro ribonucleotide
  modified_base 22: mod_base = OTHER; note = 2-deoxy-2-fluoro ribonucleotide
  modified_base 1..2: mod_base = OTHER; note = phosphorothioate internucleotide linkage
  modified_base 2..3: mod_base = OTHER; note = phosphorothioate internucleotide linkage
  modified_base 22..23: mod_base = OTHER; note = phosphorothioate internucleotide linkage
  modified_base 23..24: mod_base = OTHER; note = phosphorothioate internucleotide linkage
  modified_base 1: mod_base = OTHER; note = Thymine
tgacacctgattctgtttctgagtat

SEQ ID NO: 529 - RNA, 26 nt, synthetic construct
  source 1..26: mol_type = other RNA
  modified_base 1: mod_base = OTHER; note = 2'-deoxy nucleotide
  modified_base 3: mod_base = OTHER; note = 2'-OMe modified nucleotide
  modified_base 5: mod_base = OTHER; note = 2'-OMe modified nucleotide
  modified_base 7: mod_base = OTHER; note = 2'-OMe modified nucleotide
  modified_base 9: mod_base = OTHER; note = 2'-OMe modified nucleotide
  modified_base 11: mod_base = OTHER; note = 2'-OMe modified nucleotide
  modified_base 12: mod_base = OTHER; note = 2'-OMe modified nucleotide
  modified_base 15: mod_base = OTHER; note = 2'-OMe modified nucleotide
  modified_base 17: mod_base = OTHER; note = 2'-OMe modified nucleotide
  modified_base 19: mod_base = OTHER; note = 2'-OMe modified nucleotide
  modified_base 21: mod_base = OTHER; note = 2'-OMe modified nucleotide
  modified_base 23: mod_base = OTHER; note = 2'-OMe modified nucleotide
  modified_base 24: mod_base = OTHER; note = 2'-OMe modified nucleotide
  modified_base 26: mod_base = OTHER; note = 2'-OMe modified nucleotide
  modified_base 2: mod_base = OTHER; note = 2-deoxy-2-fluoro ribonucleotide
  modified_base 4: mod_base = OTHER; note = 2-deoxy-2-fluoro ribonucleotide
  modified_base 6: mod_base = OTHER; note = 2-deoxy-2-fluoro ribonucleotide
  modified_base 8: mod_base = OTHER; note = 2-deoxy-2-fluoro ribonucleotide
  modified_base 10: mod_base = OTHER; note = 2-deoxy-2-fluoro ribonucleotide
  modified_base 13..14: mod_base = OTHER; note = 2-deoxy-2-fluoro ribonucleotide
  modified_base 16: mod_base = OTHER; note = 2-deoxy-2-fluoro ribonucleotide
  modified_base 18: mod_base = OTHER; note = 2-deoxy-2-fluoro ribonucleotide
  modified_base 20: mod_base = OTHER; note = 2-deoxy-2-fluoro ribonucleotide
  modified_base 22: mod_base = OTHER; note = 2-deoxy-2-fluoro ribonucleotide
  modified_base 1..2: mod_base = OTHER; note = phosphorothioate internucleotide linkage
  modified_base 2..3: mod_base = OTHER; note = phosphorothioate internucleotide linkage
  modified_base 22..23: mod_base = OTHER; note = phosphorothioate internucleotide linkage
  modified_base 23..24: mod_base = OTHER; note = phosphorothioate internucleotide linkage
  modified_base 1: mod_base = OTHER; note = Thymine
tgacacctgattctgtttctgagtat

SEQ ID NO: 530 - RNA, 26 nt, synthetic construct
  source 1..26: mol_type = other RNA
  modified_base 1: mod_base = OTHER; note = 2'-deoxy nucleotide
  modified_base 3: mod_base = OTHER; note = 2'-OMe modified nucleotide
  modified_base 5: mod_base = OTHER; note = 2'-OMe modified nucleotide
  modified_base 7: mod_base = OTHER; note = 2'-OMe modified nucleotide
  modified_base 9: mod_base = OTHER; note = 2'-OMe modified nucleotide
  modified_base 11: mod_base = OTHER; note = 2'-OMe modified nucleotide
  modified_base 12: mod_base = OTHER; note = 2'-OMe modified nucleotide
  modified_base 14: mod_base = OTHER; note = 2'-OMe modified nucleotide
  modified_base 15: mod_base = OTHER; note = 2'-OMe modified nucleotide
  modified_base 17: mod_base = OTHER; note = 2'-OMe modified nucleotide
  modified_base 19: mod_base = OTHER; note = 2'-OMe modified nucleotide
  modified_base 21: mod_base = OTHER; note = 2'-OMe modified nucleotide
  modified_base 23: mod_base = OTHER; note = 2'-OMe modified nucleotide
  modified_base 24: mod_base = OTHER; note = 2'-OMe modified nucleotide
  modified_base 26: mod_base = OTHER; note = 2'-OMe modified nucleotide
  modified_base 2: mod_base = OTHER; note = 2-deoxy-2-fluoro ribonucleotide
  modified_base 4: mod_base = OTHER; note = 2-deoxy-2-fluoro ribonucleotide
  modified_base 6: mod_base = OTHER; note = 2-deoxy-2-fluoro ribonucleotide
  modified_base 8: mod_base = OTHER; note = 2-deoxy-2-fluoro ribonucleotide
  modified_base 10: mod_base = OTHER; note = 2-deoxy-2-fluoro ribonucleotide
  modified_base 13: mod_base = OTHER; note = 2-deoxy-2-fluoro ribonucleotide
  modified_base 16: mod_base = OTHER; note = 2-deoxy-2-fluoro ribonucleotide
  modified_base 18: mod_base = OTHER; note = 2-deoxy-2-fluoro ribonucleotide
  modified_base 20: mod_base = OTHER; note = 2-deoxy-2-fluoro ribonucleotide
  modified_base 22: mod_base = OTHER; note = 2-deoxy-2-fluoro ribonucleotide
  modified_base 1..2: mod_base = OTHER; note = phosphorothioate internucleotide linkage
  modified_base 2..3: mod_base = OTHER; note = phosphorothioate internucleotide linkage
  modified_base 22..23: mod_base = OTHER; note = phosphorothioate internucleotide linkage
  modified_base 23..24: mod_base = OTHER; note = phosphorothioate internucleotide linkage
  modified_base 1: mod_base = OTHER; note = Thymine
tgacacctgattctgtttctgagtat

SEQ ID NO: 531 - RNA, 26 nt, synthetic construct
  source 1..26: mol_type = other RNA
  modified_base 1: mod_base = OTHER; note = 2'-deoxy nucleotide
  modified_base 3: mod_base = OTHER; note = 2'-OMe modified nucleotide
  modified_base 5: mod_base = OTHER; note = 2'-OMe modified nucleotide
  modified_base 7: mod_base = OTHER; note = 2'-OMe modified nucleotide
  modified_base 9: mod_base = OTHER; note = 2'-OMe modified nucleotide
  modified_base 11: mod_base = OTHER; note = 2'-OMe modified nucleotide
  modified_base 14: mod_base = OTHER; note = 2'-OMe modified nucleotide
  modified_base 16: mod_base = OTHER; note = 2'-OMe modified nucleotide
  modified_base 18: mod_base = OTHER; note = 2'-OMe modified nucleotide
  modified_base 20: mod_base = OTHER; note = 2'-OMe modified nucleotide
  modified_base 22: mod_base = OTHER; note = 2'-OMe modified nucleotide
  modified_base 24: mod_base = OTHER; note = 2'-OMe modified nucleotide
  modified_base 26: mod_base = OTHER; note = 2'-OMe modified nucleotide
  modified_base 2: mod_base = OTHER; note = 2-deoxy-2-fluoro ribonucleotide
  modified_base 4: mod_base = OTHER; note = 2-deoxy-2-fluoro ribonucleotide
  modified_base 6: mod_base = OTHER; note = 2-deoxy-2-fluoro ribonucleotide
  modified_base 8: mod_base = OTHER; note = 2-deoxy-2-fluoro ribonucleotide
  modified_base 10: mod_base = OTHER; note = 2-deoxy-2-fluoro ribonucleotide
  modified_base 12..13: mod_base = OTHER; note = 2-deoxy-2-fluoro ribonucleotide
  modified_base 15: mod_base = OTHER; note = 2-deoxy-2-fluoro ribonucleotide
  modified_base 17: mod_base = OTHER; note = 2-deoxy-2-fluoro ribonucleotide
  modified_base 19: mod_base = OTHER; note = 2-deoxy-2-fluoro ribonucleotide
  modified_base 21: mod_base = OTHER; note = 2-deoxy-2-fluoro ribonucleotide
  modified_base 23: mod_base = OTHER; note = 2-deoxy-2-fluoro ribonucleotide
  modified_base 1..2: mod_base = OTHER; note = phosphorothioate internucleotide linkage
  modified_base 2..3: mod_base = OTHER; note = phosphorothioate internucleotide linkage
  modified_base 22..23: mod_base = OTHER; note = phosphorothioate internucleotide linkage
  modified_base 23..24: mod_base = OTHER; note = phosphorothioate internucleotide linkage
  modified_base 1: mod_base = OTHER; note = Thymine
tgacacctgattctgtttctgagtat

SEQ ID NO: 532 - RNA, 26 nt, synthetic construct
  source 1..26: mol_type = other RNA
  modified_base 1: mod_base = OTHER; note = 2'-deoxy nucleotide
  modified_base 3: mod_base = OTHER; note = 2'-OMe modified nucleotide
  modified_base 5: mod_base = OTHER; note = 2'-OMe modified nucleotide
  modified_base 7: mod_base = OTHER; note = 2'-OMe modified nucleotide
  modified_base 9: mod_base = OTHER; note = 2'-OMe modified nucleotide
  modified_base 11: mod_base = OTHER; note = 2'-OMe modified nucleotide
  modified_base 12: mod_base = OTHER; note = 2'-OMe modified nucleotide
  modified_base 13: mod_base = OTHER; note = 2'-OMe modified nucleotide
  modified_base 15: mod_base = OTHER; note = 2'-OMe modified nucleotide
  modified_base 17: mod_base = OTHER; note = 2'-OMe modified nucleotide
  modified_base 19: mod_base = OTHER; note = 2'-OMe modified nucleotide
  modified_base 21: mod_base = OTHER; note = 2'-OMe modified nucleotide
  modified_base 23: mod_base = OTHER; note = 2'-OMe modified nucleotide
  modified_base 24: mod_base = OTHER; note = 2'-OMe modified nucleotide
  modified_base 26: mod_base = OTHER; note = 2'-OMe modified nucleotide
  modified_base 2: mod_base = OTHER; note = 2-deoxy-2-fluoro ribonucleotide
  modified_base 4: mod_base = OTHER; note = 2-deoxy-2-fluoro ribonucleotide
  modified_base 6: mod_base = OTHER; note = 2-deoxy-2-fluoro ribonucleotide
  modified_base 8: mod_base = OTHER; note = 2-deoxy-2-fluoro ribonucleotide
  modified_base 10: mod_base = OTHER; note = 2-deoxy-2-fluoro ribonucleotide
  modified_base 14: mod_base = OTHER; note = 2-deoxy-2-fluoro ribonucleotide
  modified_base 16: mod_base = OTHER; note = 2-deoxy-2-fluoro ribonucleotide
  modified_base 18: mod_base = OTHER; note = 2-deoxy-2-fluoro ribonucleotide
  modified_base 20: mod_base = OTHER; note = 2-deoxy-2-fluoro ribonucleotide
  modified_base 22: mod_base = OTHER; note = 2-deoxy-2-fluoro ribonucleotide
  modified_base 1..2: mod_base = OTHER; note = phosphorothioate internucleotide linkage
  modified_base 2..3: mod_base = OTHER; note = phosphorothioate internucleotide linkage
  modified_base 22..23: mod_base = OTHER; note = phosphorothioate internucleotide linkage
  modified_base 23..24: mod_base = OTHER; note = phosphorothioate internucleotide linkage
  modified_base 1: mod_base = OTHER; note = Thymine
tcgtataacaataaggggctgcctat

SEQ ID NO: 533 - RNA, 26 nt, synthetic construct
  source 1..26: mol_type = other RNA
  modified_base 1: mod_base = OTHER; note = 2'-deoxy nucleotide
  modified_base 3: mod_base = OTHER; note = 2'-OMe modified nucleotide
  modified_base 5: mod_base = OTHER; note = 2'-OMe modified nucleotide
  modified_base 7: mod_base = OTHER; note = 2'-OMe modified nucleotide
  modified_base 9: mod_base = OTHER; note = 2'-OMe modified nucleotide
  modified_base 11: mod_base = OTHER; note = 2'-OMe modified nucleotide
  modified_base 12: mod_base = OTHER; note = 2'-OMe modified nucleotide
  modified_base 13: mod_base = OTHER; note = 2'-OMe modified nucleotide
  modified_base 15: mod_base = OTHER; note = 2'-OMe modified nucleotide
  modified_base 17: mod_base = OTHER; note = 2'-OMe modified nucleotide
  modified_base 19: mod_base = OTHER; note = 2'-OMe modified nucleotide
  modified_base 21: mod_base = OTHER; note = 2'-OMe modified nucleotide
  modified_base 23: mod_base = OTHER; note = 2'-OMe modified nucleotide
  modified_base 24: mod_base = OTHER; note = 2'-OMe modified nucleotide
  modified_base 26: mod_base = OTHER; note = 2'-OMe modified nucleotide
  modified_base 2: mod_base = OTHER; note = 2-deoxy-2-fluoro ribonucleotide
  modified_base 4: mod_base = OTHER; note = 2-deoxy-2-fluoro ribonucleotide
  modified_base 6: mod_base = OTHER; note = 2-deoxy-2-fluoro ribonucleotide
  modified_base 8: mod_base = OTHER; note = 2-deoxy-2-fluoro ribonucleotide
  modified_base 10: mod_base = OTHER; note = 2-deoxy-2-fluoro ribonucleotide
  modified_base 14: mod_base = OTHER; note = 2-deoxy-2-fluoro ribonucleotide
  modified_base 16: mod_base = OTHER; note = 2-deoxy-2-fluoro ribonucleotide
  modified_base 18: mod_base = OTHER; note = 2-deoxy-2-fluoro ribonucleotide
  modified_base 20: mod_base = OTHER; note = 2-deoxy-2-fluoro ribonucleotide
  modified_base 22: mod_base = OTHER; note = 2-deoxy-2-fluoro ribonucleotide
  modified_base 1..2: mod_base = OTHER; note = phosphorothioate internucleotide linkage
  modified_base 2..3: mod_base = OTHER; note = phosphorothioate internucleotide linkage
  modified_base 22..23: mod_base = OTHER; note = phosphorothioate internucleotide linkage
  modified_base 23..24: mod_base = OTHER; note = phosphorothioate internucleotide linkage
  modified_base 1: mod_base = OTHER; note = Thymine
tgcgtctgagcattgtgtcaggttat

SEQ ID NO: 534 - RNA, 26 nt, synthetic construct
  source 1..26: mol_type = other RNA
  modified_base 1: mod_base = OTHER; note = 2'-deoxy nucleotide
  modified_base 3: mod_base = OTHER; note = 2'-OMe modified nucleotide
  modified_base 5: mod_base = OTHER; note = 2'-OMe modified nucleotide
  modified_base 7: mod_base = OTHER; note = 2'-OMe modified nucleotide
  modified_base 9: mod_base = OTHER; note = 2'-OMe modified nucleotide
  modified_base 11: mod_base = OTHER; note = 2'-OMe modified nucleotide
  modified_base 12: mod_base = OTHER; note = 2'-OMe modified nucleotide
  modified_base 13: mod_base = OTHER; note = 2'-OMe modified nucleotide
  modified_base 15: mod_base = OTHER; note = 2'-OMe modified nucleotide
  modified_base 17: mod_base = OTHER; note = 2'-OMe modified nucleotide
  modified_base 19: mod_base = OTHER; note = 2'-OMe modified nucleotide
  modified_base 21: mod_base = OTHER; note = 2'-OMe modified nucleotide
  modified_base 23: mod_base = OTHER; note = 2'-OMe modified nucleotide
  modified_base 24: mod_base = OTHER; note = 2'-OMe modified nucleotide
  modified_base 26: mod_base = OTHER; note = 2'-OMe modified nucleotide
  modified_base 2: mod_base = OTHER; note = 2-deoxy-2-fluoro ribonucleotide
  modified_base 4: mod_base = OTHER; note = 2-deoxy-2-fluoro ribonucleotide
  modified_base 6: mod_base = OTHER; note = 2-deoxy-2-fluoro ribonucleotide
  modified_base 8: mod_base = OTHER; note = 2-deoxy-2-fluoro ribonucleotide
  modified_base 10: mod_base = OTHER; note = 2-deoxy-2-fluoro ribonucleotide
  modified_base 14: mod_base = OTHER; note = 2-deoxy-2-fluoro ribonucleotide
  modified_base 16: mod_base = OTHER; note = 2-deoxy-2-fluoro ribonucleotide
  modified_base 18: mod_base = OTHER; note = 2-deoxy-2-fluoro ribonucleotide
  modified_base 20: mod_base = OTHER; note = 2-deoxy-2-fluoro ribonucleotide
  modified_base 22: mod_base = OTHER; note = 2-deoxy-2-fluoro ribonucleotide
  modified_base 1..2: mod_base = OTHER; note = phosphorothioate internucleotide linkage
  modified_base 2..3: mod_base = OTHER; note = phosphorothioate internucleotide linkage
  modified_base 22..23: mod_base = OTHER; note = phosphorothioate internucleotide linkage
  modified_base 23..24: mod_base = OTHER; note = phosphorothioate internucleotide linkage
  modified_base 1: mod_base = OTHER; note = Thymine
ttgcgtctgagcattgtgtcaggtat

SEQ ID NO: 535 - RNA, 26 nt, synthetic construct
  source 1..26: mol_type = other RNA
  modified_base 1: mod_base = OTHER; note = 2'-deoxy nucleotide
  modified_base 3: mod_base = OTHER; note = 2'-OMe modified nucleotide
  modified_base 5: mod_base = OTHER; note = 2'-OMe modified nucleotide
  modified_base 7: mod_base = OTHER; note = 2'-OMe modified nucleotide
  modified_base 9: mod_base = OTHER; note = 2'-OMe modified nucleotide
  modified_base 11: mod_base = OTHER; note = 2'-OMe modified nucleotide
  modified_base 12: mod_base = OTHER; note = 2'-OMe modified nucleotide
  modified_base 13: mod_base = OTHER; note = 2'-OMe modified nucleotide
  modified_base 15: mod_base = OTHER; note = 2'-OMe modified nucleotide
  modified_base 17: mod_base = OTHER; note = 2'-OMe modified nucleotide
  modified_base 19: mod_base = OTHER; note = 2'-OMe modified nucleotide
  modified_base 21: mod_base = OTHER; note = 2'-OMe modified nucleotide
  modified_base 23: mod_base = OTHER; note = 2'-OMe modified nucleotide
  modified_base 24: mod_base = OTHER; note = 2'-OMe modified nucleotide
  modified_base 26: mod_base = OTHER; note = 2'-OMe modified nucleotide
  modified_base 2: mod_base = OTHER; note = 2-deoxy-2-fluoro ribonucleotide
  modified_base 4: mod_base = OTHER; note = 2-deoxy-2-fluoro ribonucleotide
  modified_base 6: mod_base = OTHER; note = 2-deoxy-2-fluoro ribonucleotide
  modified_base 8: mod_base = OTHER; note = 2-deoxy-2-fluoro ribonucleotide
  modified_base 10: mod_base = OTHER; note = 2-deoxy-2-fluoro ribonucleotide
  modified_base 14: mod_base = OTHER; note = 2-deoxy-2-fluoro ribonucleotide
  modified_base 16: mod_base = OTHER; note = 2-deoxy-2-fluoro ribonucleotide
  modified_base 18: mod_base = OTHER; note = 2-deoxy-2-fluoro ribonucleotide
  modified_base 20: mod_base = OTHER; note = 2-deoxy-2-fluoro ribonucleotide
  modified_base 22: mod_base = OTHER; note = 2-deoxy-2-fluoro ribonucleotide
  modified_base 1..2: mod_base = OTHER; note = phosphorothioate internucleotide linkage
  modified_base 2..3: mod_base = OTHER; note = phosphorothioate internucleotide linkage
  modified_base 22..23: mod_base = OTHER; note = phosphorothioate internucleotide linkage
  modified_base 23..24: mod_base = OTHER; note = phosphorothioate internucleotide linkage
  modified_base 1: mod_base = OTHER; note = Thymine
tgagaatgagcctcgataactcttat

SEQ ID NO: 536 - RNA, 26 nt, synthetic construct
  source 1..26: mol_type = other RNA
  modified_base 1: mod_base = OTHER; note = 2'-deoxy nucleotide
  modified_base 3: mod_base = OTHER; note = 2'-OMe modified nucleotide
  modified_base 5: mod_base = OTHER; note = 2'-OMe modified nucleotide
  modified_base 7: mod_base = OTHER; note = 2'-OMe modified nucleotide
  modified_base 9: mod_base = OTHER; note = 2'-OMe modified nucleotide
  modified_base 11: mod_base = OTHER; note = 2'-OMe modified nucleotide
  modified_base 12: mod_base = OTHER; note = 2'-OMe modified nucleotide
  modified_base 13: mod_base = OTHER; note = 2'-OMe modified nucleotide
  modified_base 15: mod_base = OTHER; note = 2'-OMe modified nucleotide
  modified_base 17: mod_base = OTHER; note = 2'-OMe modified nucleotide
  modified_base 19: mod_base = OTHER; note = 2'-OMe modified nucleotide
  modified_base 21: mod_base = OTHER; note = 2'-OMe modified nucleotide
  modified_base 23: mod_base = OTHER; note = 2'-OMe modified nucleotide
  modified_base 24: mod_base = OTHER; note = 2'-OMe modified nucleotide
  modified_base 26: mod_base = OTHER; note = 2'-OMe modified nucleotide
  modified_base 2: mod_base = OTHER; note = 2-deoxy-2-fluoro ribonucleotide
  modified_base 4: mod_base = OTHER; note = 2-deoxy-2-fluoro ribonucleotide
  modified_base 6: mod_base = OTHER; note = 2-deoxy-2-fluoro ribonucleotide
  modified_base 8: mod_base = OTHER; note = 2-deoxy-2-fluoro ribonucleotide
  modified_base 10: mod_base = OTHER; note = 2-deoxy-2-fluoro ribonucleotide
  modified_base 14: mod_base = OTHER; note = 2-deoxy-2-fluoro ribonucleotide
  modified_base 16: mod_base = OTHER; note = 2-deoxy-2-fluoro ribonucleotide
  modified_base 18: mod_base = OTHER; note = 2-deoxy-2-fluoro ribonucleotide
  modified_base 20: mod_base = OTHER; note = 2-deoxy-2-fluoro ribonucleotide
  modified_base 22: mod_base = OTHER; note = 2-deoxy-2-fluoro ribonucleotide
  modified_base 1..2: mod_base = OTHER; note = phosphorothioate internucleotide linkage
  modified_base 2..3: mod_base = OTHER; note = phosphorothioate internucleotide linkage
  modified_base 22..23: mod_base = OTHER; note = phosphorothioate internucleotide linkage
  modified_base 23..24: mod_base = OTHER; note = phosphorothioate internucleotide linkage
  modified_base 1: mod_base = OTHER; note = Thymine
tgacacctgattctgtttctgagtat

SEQ ID NO: 537 - RNA, 26 nt, synthetic construct
  source 1..26: mol_type = other RNA
  modified_base 1: mod_base = OTHER; note = 2'-deoxy nucleotide
  modified_base 3: mod_base = OTHER; note = 2'-OMe modified nucleotide
  modified_base 5: mod_base = OTHER; note = 2'-OMe modified nucleotide
  modified_base 7: mod_base = OTHER; note = 2'-OMe modified nucleotide
  modified_base 9: mod_base = OTHER; note = 2'-OMe modified nucleotide
  modified_base 11: mod_base = OTHER; note = 2'-OMe modified nucleotide
  modified_base 12: mod_base = OTHER; note = 2'-OMe modified nucleotide
  modified_base 13: mod_base = OTHER; note = 2'-OMe modified nucleotide
  modified_base 15: mod_base = OTHER; note = 2'-OMe modified nucleotide
  modified_base 17: mod_base = OTHER; note = 2'-OMe modified nucleotide
  modified_base 19: mod_base = OTHER; note = 2'-OMe modified nucleotide
  modified_base 21: mod_base = OTHER; note = 2'-OMe modified nucleotide
  modified_base 23: mod_base = OTHER; note = 2'-OMe modified nucleotide
  modified_base 24: mod_base = OTHER; note = 2'-OMe modified nucleotide
  modified_base 26: mod_base = OTHER; note = 2'-OMe modified nucleotide
  modified_base 2: mod_base = OTHER; note = 2-deoxy-2-fluoro ribonucleotide
  modified_base 4: mod_base = OTHER; note = 2-deoxy-2-fluoro ribonucleotide
  modified_base 6: mod_base = OTHER; note = 2-deoxy-2-fluoro ribonucleotide
  modified_base 8: mod_base = OTHER; note = 2-deoxy-2-fluoro ribonucleotide
  modified_base 10: mod_base = OTHER; note = 2-deoxy-2-fluoro ribonucleotide
  modified_base 14: mod_base = OTHER; note = 2-deoxy-2-fluoro ribonucleotide
  modified_base 16: mod_base = OTHER; note = 2-deoxy-2-fluoro ribonucleotide
  modified_base 18: mod_base = OTHER; note = 2-deoxy-2-fluoro ribonucleotide
  modified_base 20: mod_base = OTHER; note = 2-deoxy-2-fluoro ribonucleotide
  modified_base 22: mod_base = OTHER; note = 2-deoxy-2-fluoro ribonucleotide
  modified_base 1..2: mod_base = OTHER; note = phosphorothioate internucleotide linkage
  modified_base 2..3: mod_base = OTHER; note = phosphorothioate internucleotide linkage
  modified_base 22..23: mod_base = OTHER; note = phosphorothioate internucleotide linkage
  modified_base 23..24: mod_base = OTHER; note = phosphorothioate internucleotide linkage
  modified_base 1: mod_base = OTHER; note = Thymine
taagggcgaatctcagcatctggtat

SEQ ID NO: 538 - RNA, 18 nt, synthetic construct
  source 1..18: mol_type = other RNA
  modified_base 1: mod_base = OTHER; note = 2'-OMe modified nucleotide
  modified_base 3: mod_base = OTHER; note = 2'-OMe modified nucleotide
  modified_base 5: mod_base = OTHER; note = 2'-OMe modified nucleotide
  modified_base 7: mod_base = OTHER; note = 2'-OMe modified nucleotide
  modified_base 9: mod_base = OTHER; note = 2'-OMe modified nucleotide
  modified_base 11: mod_base = OTHER; note = 2'-OMe modified nucleotide
  modified_base 13: mod_base = OTHER; note = 2'-OMe modified nucleotide
  modified_base 15: mod_base = OTHER; note = 2'-OMe modified nucleotide
  modified_base 17: mod_base = OTHER; note = 2'-OMe modified nucleotide
  modified_base 2: mod_base = OTHER; note = 2-deoxy-2-fluoro ribonucleotide
  modified_base 4: mod_base = OTHER; note = 2-deoxy-2-fluoro ribonucleotide
  modified_base 6: mod_base = OTHER; note = 2-deoxy-2-fluoro ribonucleotide
  modified_base 8: mod_base = OTHER; note = 2-deoxy-2-fluoro ribonucleotide
  modified_base 10: mod_base = OTHER; note = 2-deoxy-2-fluoro ribonucleotide
  modified_base 12: mod_base = OTHER; note = 2-deoxy-2-fluoro ribonucleotide
  modified_base 14: mod_base = OTHER; note = 2-deoxy-2-fluoro ribonucleotide
  modified_base 16: mod_base = OTHER; note = 2-deoxy-2-fluoro ribonucleotide
  modified_base 18: mod_base = OTHER; note = 2-deoxy-2-fluoro ribonucleotide
  modified_base 1..2: mod_base = OTHER; note = phosphorothioate internucleotide linkage
  modified_base 2..3: mod_base = OTHER; note = phosphorothioate internucleotide linkage
ttaacaataaggggctgc

SEQ ID NO: 539 - RNA, 18 nt, synthetic construct
  source 1..18: mol_type = other RNA
  modified_base 1: mod_base = OTHER; note = 2'-OMe modified nucleotide
  modified_base 3: mod_base = OTHER; note = 2'-OMe modified nucleotide
  modified_base 5: mod_base = OTHER; note = 2'-OMe modified nucleotide
  modified_base 7: mod_base = OTHER; note = 2'-OMe modified nucleotide
  modified_base 9: mod_base = OTHER; note = 2'-OMe modified nucleotide
  modified_base 11: mod_base = OTHER; note = 2'-OMe modified nucleotide
  modified_base 13: mod_base = OTHER; note = 2'-OMe modified nucleotide
  modified_base 15: mod_base = OTHER; note = 2'-OMe modified nucleotide
  modified_base 17: mod_base = OTHER; note = 2'-OMe modified nucleotide
  modified_base 2: mod_base = OTHER; note = 2-deoxy-2-fluoro ribonucleotide
  modified_base 4: mod_base = OTHER; note = 2-deoxy-2-fluoro ribonucleotide
  modified_base 6: mod_base = OTHER; note = 2-deoxy-2-fluoro ribonucleotide
  modified_base 8: mod_base = OTHER; note = 2-deoxy-2-fluoro ribonucleotide
  modified_base 10: mod_base = OTHER; note = 2-deoxy-2-fluoro ribonucleotide
  modified_base 12: mod_base = OTHER; note = 2-deoxy-2-fluoro ribonucleotide
  modified_base 14: mod_base = OTHER; note = 2-deoxy-2-fluoro ribonucleotide
  modified_base 16: mod_base = OTHER; note = 2-deoxy-2-fluoro ribonucleotide
  modified_base 18: mod_base = OTHER; note = 2-deoxy-2-fluoro ribonucleotide
  modified_base 1..2: mod_base = OTHER; note = phosphorothioate internucleotide linkage
  modified_base 2..3: mod_base = OTHER; note = phosphorothioate internucleotide linkage
tgtataacaataaggggc

SEQ ID NO: 540 - RNA, 18 nt, synthetic construct
  source 1..18: mol_type = other RNA
  modified_base 1: mod_base = OTHER; note = 2'-OMe modified nucleotide
  modified_base 3: mod_base = OTHER; note = 2'-OMe modified nucleotide
  modified_base 5: mod_base = OTHER; note = 2'-OMe modified nucleotide
  modified_base 7: mod_base = OTHER; note = 2'-OMe modified nucleotide
  modified_base 9: mod_base = OTHER; note = 2'-OMe modified nucleotide
  modified_base 11: mod_base = OTHER; note = 2'-OMe modified nucleotide
  modified_base 13: mod_base = OTHER; note = 2'-OMe modified nucleotide
  modified_base 15: mod_base = OTHER; note = 2'-OMe modified nucleotide
  modified_base 17: mod_base = OTHER; note = 2'-OMe modified nucleotide
  modified_base 2: mod_base = OTHER; note = 2-deoxy-2-fluoro ribonucleotide
  modified_base 4: mod_base = OTHER; note = 2-deoxy-2-fluoro ribonucleotide
  modified_base 6: mod_base = OTHER; note = 2-deoxy-2-fluoro ribonucleotide
  modified_base 8: mod_base = OTHER; note = 2-deoxy-2-fluoro ribonucleotide
  modified_base 10: mod_base = OTHER; note = 2-deoxy-2-fluoro ribonucleotide
  modified_base 12: mod_base = OTHER; note = 2-deoxy-2-fluoro ribonucleotide
  modified_base 14: mod_base = OTHER; note = 2-deoxy-2-fluoro ribonucleotide
  modified_base 16: mod_base = OTHER; note = 2-deoxy-2-fluoro ribonucleotide
  modified_base 18: mod_base = OTHER; note = 2-deoxy-2-fluoro ribonucleotide
  modified_base 1..2: mod_base = OTHER; note = phosphorothioate internucleotide linkage
  modified_base 2..3: mod_base = OTHER; note = phosphorothioate internucleotide linkage
tcgtataacaataagggg

SEQ ID NO: 541 - RNA, 18 nt, synthetic construct
  source 1..18: mol_type = other RNA
  modified_base 1: mod_base = OTHER; note = 2'-OMe modified nucleotide
  modified_base 3: mod_base = OTHER; note = 2'-OMe modified nucleotide
  modified_base 5: mod_base = OTHER; note = 2'-OMe modified nucleotide
  modified_base 7: mod_base = OTHER; note = 2'-OMe modified nucleotide
  modified_base 9: mod_base = OTHER; note = 2'-OMe modified nucleotide
  modified_base 11: mod_base = OTHER; note = 2'-OMe modified nucleotide
  modified_base 13: mod_base = OTHER; note = 2'-OMe modified nucleotide
  modified_base 15: mod_base = OTHER; note = 2'-OMe modified nucleotide
  modified_base 17: mod_base = OTHER; note = 2'-OMe modified nucleotide
  modified_base 2: mod_base = OTHER; note = 2-deoxy-2-fluoro ribonucleotide
  modified_base 4: mod_base = OTHER; note = 2-deoxy-2-fluoro ribonucleotide
  modified_base 6: mod_base = OTHER; note = 2-deoxy-2-fluoro ribonucleotide
  modified_base 8: mod_base = OTHER; note = 2-deoxy-2-fluoro ribonucleotide
  modified_base 10: mod_base = OTHER; note = 2-deoxy-2-fluoro ribonucleotide
  modified_base 12: mod_base = OTHER; note = 2-deoxy-2-fluoro ribonucleotide
  modified_base 14: mod_base = OTHER; note = 2-deoxy-2-fluoro ribonucleotide
  modified_base 16: mod_base = OTHER; note = 2-deoxy-2-fluoro ribonucleotide
  modified_base 18: mod_base = OTHER; note = 2-deoxy-2-fluoro ribonucleotide
  modified_base 1..2: mod_base = OTHER; note = phosphorothioate internucleotide linkage
  modified_base 2..3: mod_base = OTHER; note = phosphorothioate internucleotide linkage
tgcgtctgagcattgtgt

SEQ ID NO: 542 - RNA, 18 nt, synthetic construct
  source 1..18: mol_type = other RNA
  modified_base 1: mod_base = OTHER; note = 2'-OMe modified nucleotide
  modified_base 3: mod_base = OTHER; note = 2'-OMe modified nucleotide
  modified_base 5: mod_base = OTHER; note = 2'-OMe modified nucleotide
  modified_base 7: mod_base = OTHER; note = 2'-OMe modified nucleotide
  modified_base 9: mod_base = OTHER; note = 2'-OMe modified nucleotide
  modified_base 11: mod_base = OTHER; note = 2'-OMe modified nucleotide
  modified_base 13: mod_base = OTHER; note = 2'-OMe modified nucleotide
  modified_base 15: mod_base = OTHER; note = 2'-OMe modified nucleotide
  modified_base 17: mod_base = OTHER; note = 2'-OMe modified nucleotide
  modified_base 2: mod_base = OTHER; note = 2-deoxy-2-fluoro ribonucleotide
  modified_base 4: mod_base = OTHER; note = 2-deoxy-2-fluoro ribonucleotide
  modified_base 6: mod_base = OTHER; note = 2-deoxy-2-fluoro ribonucleotide
  modified_base 8: mod_base = OTHER; note = 2-deoxy-2-fluoro ribonucleotide
  modified_base 10: mod_base = OTHER; note = 2-deoxy-2-fluoro ribonucleotide
  modified_base 12: mod_base = OTHER; note = 2-deoxy-2-fluoro ribonucleotide
  modified_base 14: mod_base = OTHER; note = 2-deoxy-2-fluoro ribonucleotide
  modified_base 16: mod_base = OTHER; note = 2-deoxy-2-fluoro ribonucleotide
  modified_base 18: mod_base = OTHER; note = 2-deoxy-2-fluoro ribonucleotide
  modified_base 1..2: mod_base = OTHER; note = phosphorothioate internucleotide linkage
  modified_base 2..3: mod_base = OTHER; note = phosphorothioate internucleotide linkage
ttgcgtctgagcattgtg

SEQ ID NO: 543 - RNA, 18 nt, synthetic construct
  source 1..18: mol_type = other RNA
  modified_base 1: mod_base = OTHER; note = 2'-OMe modified nucleotide
  modified_base 3: mod_base = OTHER; note = 2'-OMe modified nucleotide
  modified_base 5: mod_base = OTHER; note = 2'-OMe modified nucleotide
  modified_base 7: mod_base = OTHER; note = 2'-OMe modified nucleotide
  modified_base 9: mod_base = OTHER; note = 2'-OMe modified nucleotide
  modified_base 11: mod_base = OTHER; note = 2'-OMe modified nucleotide
  modified_base 13: mod_base = OTHER; note = 2'-OMe modified nucleotide
  modified_base 15: mod_base = OTHER; note = 2'-OMe modified nucleotide
  modified_base 17: mod_base = OTHER; note = 2'-OMe modified nucleotide
  modified_base 2: mod_base = OTHER; note = 2-deoxy-2-fluoro ribonucleotide
  modified_base 4: mod_base = OTHER; note = 2-deoxy-2-fluoro ribonucleotide
  modified_base 6: mod_base = OTHER; note = 2-deoxy-2-fluoro ribonucleotide
  modified_base 8: mod_base = OTHER; note = 2-deoxy-2-fluoro ribonucleotide
  modified_base 10: mod_base = OTHER; note = 2-deoxy-2-fluoro ribonucleotide
  modified_base 12: mod_base = OTHER; note = 2-deoxy-2-fluoro ribonucleotide
  modified_base 14: mod_base = OTHER; note = 2-deoxy-2-fluoro ribonucleotide
  modified_base 16: mod_base = OTHER; note = 2-deoxy-2-fluoro ribonucleotide
  modified_base 18: mod_base = OTHER; note = 2-deoxy-2-fluoro ribonucleotide
  modified_base 1..2: mod_base = OTHER; note = phosphorothioate internucleotide linkage
  modified_base 2..3: mod_base = OTHER; note = phosphorothioate internucleotide linkage
tcaggatctggatttcgg

SEQ ID NO: 544 - RNA, 18 nt, synthetic construct
  source 1..18: mol_type = other RNA
  modified_base 1: mod_base = OTHER; note = 2'-OMe modified nucleotide
  modified_base 3: mod_base = OTHER; note = 2'-OMe modified nucleotide
  modified_base 5: mod_base = OTHER; note = 2'-OMe modified nucleotide
  modified_base 7: mod_base = OTHER; note = 2'-OMe modified nucleotide
  modified_base 9: mod_base = OTHER; note = 2'-OMe modified nucleotide
  modified_base 11: mod_base = OTHER; note = 2'-OMe modified nucleotide
  modified_base 13: mod_base = OTHER; note = 2'-OMe modified nucleotide
  modified_base 15: mod_base = OTHER; note = 2'-OMe modified nucleotide
  modified_base 17: mod_base = OTHER; note = 2'-OMe modified nucleotide
  modified_base 2: mod_base = OTHER; note = 2-deoxy-2-fluoro ribonucleotide
  modified_base 4: mod_base = OTHER; note = 2-deoxy-2-fluoro ribonucleotide
  modified_base 6: mod_base = OTHER; note = 2-deoxy-2-fluoro ribonucleotide
  modified_base 8: mod_base = OTHER; note = 2-deoxy-2-fluoro ribonucleotide
  modified_base 10: mod_base = OTHER; note = 2-deoxy-2-fluoro ribonucleotide
  modified_base 12: mod_base = OTHER; note = 2-deoxy-2-fluoro ribonucleotide
  modified_base 14: mod_base = OTHER; note = 2-deoxy-2-fluoro ribonucleotide
  modified_base 16: mod_base = OTHER; note = 2-deoxy-2-fluoro ribonucleotide
  modified_base 18: mod_base = OTHER; note = 2-deoxy-2-fluoro ribonucleotide
  modified_base 1..2: mod_base = OTHER; note = phosphorothioate internucleotide linkage
  modified_base 2..3: mod_base = OTHER; note = phosphorothioate internucleotide linkage
ttgcatctgagcatcgtg

SEQ ID NO: 545 - RNA, 18 nt, synthetic construct
  source 1..18: mol_type = other RNA
  modified_base 1: mod_base = OTHER; note = 2'-OMe modified nucleotide
  modified_base 3: mod_base = OTHER; note = 2'-OMe modified nucleotide
  modified_base 5: mod_base = OTHER; note = 2'-OMe modified nucleotide
  modified_base 7: mod_base = OTHER; note = 2'-OMe modified nucleotide
  modified_base 9: mod_base = OTHER; note = 2'-OMe modified nucleotide
  modified_base 11: mod_base = OTHER; note = 2'-OMe modified nucleotide
  modified_base 13: mod_base = OTHER; note = 2'-OMe modified nucleotide
  modified_base 15: mod_base = OTHER; note = 2'-OMe modified nucleotide
  modified_base 17: mod_base = OTHER; note = 2'-OMe modified nucleotide
  modified_base 2: mod_base = OTHER; note = 2-deoxy-2-fluoro ribonucleotide
  modified_base 4: mod_base = OTHER; note = 2-deoxy-2-fluoro ribonucleotide
  modified_base 6: mod_base = OTHER; note = 2-deoxy-2-fluoro ribonucleotide
  modified_base 8: mod_base = OTHER; note = 2-deoxy-2-fluoro ribonucleotide
  modified_base 10: mod_base = OTHER; note = 2-deoxy-2-fluoro ribonucleotide
  modified_base 12: mod_base = OTHER; note = 2-deoxy-2-fluoro ribonucleotide
  modified_base 14: mod_base = OTHER; note = 2-deoxy-2-fluoro ribonucleotide
  modified_base 16: mod_base = OTHER; note = 2-deoxy-2-fluoro ribonucleotide
  modified_base 18: mod_base = OTHER; note = 2-deoxy-2-fluoro ribonucleotide
  modified_base 1..2: mod_base = OTHER; note = phosphorothioate internucleotide linkage
  modified_base 2..3: mod_base = OTHER; note = phosphorothioate internucleotide linkage
tcgactatgctggtgtgg

SEQ ID NO: 546 - RNA, 18 nt, synthetic construct
  source 1..18: mol_type = other RNA
  modified_base 1: mod_base = OTHER; note = 2'-OMe modified nucleotide
  modified_base 3: mod_base = OTHER; note = 2'-OMe modified nucleotide
  modified_base 5: mod_base = OTHER; note = 2'-OMe modified nucleotide
  modified_base 7: mod_base = OTHER; note = 2'-OMe modified nucleotide
  modified_base 9: mod_base = OTHER; note = 2'-OMe modified nucleotide
  modified_base 11: mod_base = OTHER; note = 2'-OMe modified nucleotide
  modified_base 13: mod_base = OTHER; note = 2'-OMe modified nucleotide
  modified_base 15: mod_base = OTHER; note = 2'-OMe modified nucleotide
  modified_base 17: mod_base = OTHER; note = 2'-OMe modified nucleotide
  modified_base 2: mod_base = OTHER; note = 2-deoxy-2-fluoro ribonucleotide
  modified_base 4: mod_base = OTHER; note = 2-deoxy-2-fluoro ribonucleotide
  modified_base 6: mod_base = OTHER; note = 2-deoxy-2-fluoro ribonucleotide
  modified_base 8: mod_base = OTHER; note = 2-deoxy-2-fluoro ribonucleotide
  modified_base 10: mod_base = OTHER; note = 2-deoxy-2-fluoro ribonucleotide
  modified_base 12: mod_base = OTHER; note = 2-deoxy-2-fluoro ribonucleotide
  modified_base 14: mod_base = OTHER; note = 2-deoxy-2-fluoro ribonucleotide
  modified_base 16: mod_base = OTHER; note = 2-deoxy-2-fluoro ribonucleotide
  modified_base 18: mod_base = OTHER; note = 2-deoxy-2-fluoro ribonucleotide
  modified_base 1..2: mod_base = OTHER; note = phosphorothioate internucleotide linkage
  modified_base 2..3: mod_base = OTHER; note = phosphorothioate internucleotide linkage
ttttctggggtccgacta

SEQ ID NO: 547 - RNA, 18 nt, synthetic construct
  source 1..18: mol_type = other RNA
  modified_base 1: mod_base = OTHER; note = 2'-OMe modified nucleotide
  modified_base 3: mod_base = OTHER; note = 2'-OMe modified nucleotide
  modified_base 5: mod_base = OTHER; note = 2'-OMe modified nucleotide
  modified_base 7: mod_base = OTHER; note = 2'-OMe modified nucleotide
  modified_base 9: mod_base = OTHER; note = 2'-OMe modified nucleotide
  modified_base 11: mod_base = OTHER; note = 2'-OMe modified nucleotide
  modified_base 13: mod_base = OTHER; note = 2'-OMe modified nucleotide
  modified_base 15: mod_base = OTHER; note = 2'-OMe modified nucleotide
  modified_base 17: mod_base = OTHER; note = 2'-OMe modified nucleotide
  modified_base 2: mod_base = OTHER; note = 2-deoxy-2-fluoro ribonucleotide
  modified_base 4: mod_base = OTHER; note = 2-deoxy-2-fluoro ribonucleotide
  modified_base 6: mod_base = OTHER; note = 2-deoxy-2-fluoro ribonucleotide
  modified_base 8: mod_base = OTHER; note = 2-deoxy-2-fluoro ribonucleotide
  modified_base 10: mod_base = OTHER; note = 2-deoxy-2-fluoro ribonucleotide
  modified_base 12: mod_base = OTHER; note = 2-deoxy-2-fluoro ribonucleotide
  modified_base 14: mod_base = OTHER; note = 2-deoxy-2-fluoro ribonucleotide
  modified_base 16: mod_base = OTHER; note = 2-deoxy-2-fluoro ribonucleotide
  modified_base 18: mod_base = OTHER; note = 2-deoxy-2-fluoro ribonucleotide
  modified_base 1..2: mod_base = OTHER; note = phosphorothioate internucleotide linkage
  modified_base 2..3: mod_base = OTHER; note = phosphorothioate internucleotide linkage
tgcgaatctcagcatctg

SEQ ID NO: 548 - RNA, 18 nt, synthetic construct
  source 1..18: mol_type = other RNA
  modified_base 1: mod_base = OTHER; note = 2'-OMe modified nucleotide
  modified_base 3: mod_base = OTHER; note = 2'-OMe modified nucleotide
  modified_base 5: mod_base = OTHER; note = 2'-OMe modified nucleotide
  modified_base 7: mod_base = OTHER; note = 2'-OMe modified nucleotide
  modified_base 9: mod_base = OTHER; note = 2'-OMe modified nucleotide
  modified_base 11: mod_base = OTHER; note = 2'-OMe modified nucleotide
  modified_base 13: mod_base = OTHER; note = 2'-OMe modified nucleotide
  modified_base 15: mod_base = OTHER; note = 2'-OMe modified nucleotide
  modified_base 17: mod_base = OTHER; note = 2'-OMe modified nucleotide
  modified_base 2: mod_base = OTHER; note = 2-deoxy-2-fluoro ribonucleotide
  modified_base 4: mod_base = OTHER; note = 2-deoxy-2-fluoro ribonucleotide
  modified_base 6: mod_base = OTHER; note = 2-deoxy-2-fluoro ribonucleotide
  modified_base 8: mod_base = OTHER; note = 2-deoxy-2-fluoro ribonucleotide
  modified_base 10: mod_base = OTHER; note = 2-deoxy-2-fluoro ribonucleotide
  modified_base 12: mod_base = OTHER; note = 2-deoxy-2-fluoro ribonucleotide
  modified_base 14: mod_base = OTHER; note = 2-deoxy-2-fluoro ribonucleotide
  modified_base 16: mod_base = OTHER; note = 2-deoxy-2-fluoro ribonucleotide
  modified_base 18: mod_base = OTHER; note = 2-deoxy-2-fluoro ribonucleotide
  modified_base 1..2: mod_base = OTHER; note = phosphorothioate internucleotide linkage
  modified_base 2..3: mod_base = OTHER; note = phosphorothioate internucleotide linkage
ttgcaaggacacttgatt

SEQ ID NO: 549 - RNA, 18 nt, synthetic construct
  source 1..18: mol_type = other RNA
  modified_base 1: mod_base = OTHER; note = 2'-OMe modified nucleotide
  modified_base 3: mod_base = OTHER; note = 2'-OMe modified nucleotide
  modified_base 5: mod_base = OTHER; note = 2'-OMe modified nucleotide
  modified_base 7: mod_base = OTHER; note = 2'-OMe modified nucleotide
  modified_base 9: mod_base = OTHER; note = 2'-OMe modified nucleotide
  modified_base 11: mod_base = OTHER; note = 2'-OMe modified nucleotide
  modified_base 13: mod_base = OTHER; note = 2'-OMe modified nucleotide
  modified_base 15: mod_base = OTHER; note = 2'-OMe modified nucleotide
  modified_base 17: mod_base = OTHER; note = 2'-OMe modified nucleotide
  modified_base 2: mod_base = OTHER; note = 2-deoxy-2-fluoro ribonucleotide
  modified_base 4: mod_base = OTHER; note = 2-deoxy-2-fluoro ribonucleotide
  modified_base 6: mod_base = OTHER; note = 2-deoxy-2-fluoro ribonucleotide
  modified_base 8: mod_base = OTHER; note = 2-deoxy-2-fluoro ribonucleotide
  modified_base 10: mod_base = OTHER; note = 2-deoxy-2-fluoro ribonucleotide
  modified_base 12: mod_base = OTHER; note = 2-deoxy-2-fluoro ribonucleotide
  modified_base 14: mod_base = OTHER; note = 2-deoxy-2-fluoro ribonucleotide
  modified_base 16: mod_base = OTHER; note = 2-deoxy-2-fluoro ribonucleotide
  modified_base 18: mod_base = OTHER; note = 2-deoxy-2-fluoro ribonucleotide
  modified_base 1..2: mod_base = OTHER; note = phosphorothioate internucleotide linkage
  modified_base 2..3: mod_base = OTHER; note = phosphorothioate internucleotide linkage
taatgagcctcgataact

SEQ ID NO: 550 - RNA, 18 nt, synthetic construct
  source 1..18: mol_type = other RNA
  modified_base 1: mod_base = OTHER; note = 2'-OMe modified nucleotide
  modified_base 3: mod_base = OTHER; note = 2'-OMe modified nucleotide
  modified_base 5: mod_base = OTHER; note = 2'-OMe modified nucleotide
  modified_base 7: mod_base = OTHER; note = 2'-OMe modified nucleotide
  modified_base 9: mod_base = OTHER; note = 2'-OMe modified nucleotide
  modified_base 11: mod_base = OTHER; note = 2'-OMe modified nucleotide
  modified_base 13: mod_base = OTHER; note = 2'-OMe modified nucleotide
  modified_base 15: mod_base = OTHER; note = 2'-OMe modified nucleotide
  modified_base 17: mod_base = OTHER; note = 2'-OMe modified nucleotide
  modified_base 2: mod_base = OTHER; note = 2-deoxy-2-fluoro ribonucleotide
  modified_base 4: mod_base = OTHER; note = 2-deoxy-2-fluoro ribonucleotide
  modified_base 6: mod_base = OTHER; note = 2-deoxy-2-fluoro ribonucleotide
  modified_base 8: mod_base = OTHER; note = 2-deoxy-2-fluoro ribonucleotide
  modified_base 10: mod_base = OTHER; note = 2-deoxy-2-fluoro ribonucleotide
  modified_base 12: mod_base = OTHER; note = 2-deoxy-2-fluoro ribonucleotide
  modified_base 14: mod_base = OTHER; note = 2-deoxy-2-fluoro ribonucleotide
  modified_base 16: mod_base = OTHER; note = 2-deoxy-2-fluoro ribonucleotide
  modified_base 18: mod_base = OTHER; note = 2-deoxy-2-fluoro ribonucleotide
  modified_base 1..2: mod_base = OTHER; note = phosphorothioate internucleotide linkage
  modified_base 2..3: mod_base = OTHER; note = phosphorothioate internucleotide linkage
tgaatgagcctcgataac

SEQ ID NO: 551 - RNA, 18 nt, synthetic construct
  source 1..18: mol_type = other RNA
  modified_base 1: mod_base = OTHER; note = 2'-OMe modified nucleotide
  modified_base 3: mod_base = OTHER; note = 2'-OMe modified nucleotide
  modified_base 5: mod_base = OTHER; note = 2'-OMe modified nucleotide
  modified_base 7: mod_base = OTHER; note = 2'-OMe modified nucleotide
  modified_base 9: mod_base = OTHER; note = 2'-OMe modified nucleotide
  modified_base 11: mod_base = OTHER; note = 2'-OMe modified nucleotide
  modified_base 13: mod_base = OTHER; note = 2'-OMe modified nucleotide
  modified_base 15: mod_base = OTHER; note = 2'-OMe modified nucleotide
  modified_base 17: mod_base = OTHER; note = 2'-OMe modified nucleotide
  modified_base 2: mod_base = OTHER; note = 2-deoxy-2-fluoro ribonucleotide
  modified_base 4: mod_base = OTHER; note = 2-deoxy-2-fluoro ribonucleotide
  modified_base 6: mod_base = OTHER; note = 2-deoxy-2-fluoro ribonucleotide
  modified_base 8: mod_base = OTHER; note = 2-deoxy-2-fluoro ribonucleotide
  modified_base 10: mod_base = OTHER; note = 2-deoxy-2-fluoro ribonucleotide
  modified_base 12: mod_base = OTHER; note = 2-deoxy-2-fluoro ribonucleotide
  modified_base 14: mod_base = OTHER; note = 2-deoxy-2-fluoro ribonucleotide
  modified_base 16: mod_base = OTHER; note = 2-deoxy-2-fluoro ribonucleotide
  modified_base 18: mod_base = OTHER; note = 2-deoxy-2-fluoro ribonucleotide
  modified_base 1..2: mod_base = OTHER; note = phosphorothioate internucleotide linkage
  modified_base 2..3: mod_base = OTHER; note = phosphorothioate internucleotide linkage
tgacattgtgtcaggttg

SEQ ID NO: 552 - RNA, 18 nt, synthetic construct
  source 1..18: mol_type = other RNA
  modified_base 1: mod_base = OTHER; note = 2'-OMe modified nucleotide
  modified_base 3: mod_base = OTHER; note = 2'-OMe modified nucleotide
  modified_base 5: mod_base = OTHER; note = 2'-OMe modified nucleotide
  modified_base 7: mod_base = OTHER; note = 2'-OMe modified nucleotide
  modified_base 9: mod_base = OTHER; note = 2'-OMe modified nucleotide
  modified_base 11: mod_base = OTHER; note = 2'-OMe modified nucleotide
  modified_base 13: mod_base = OTHER; note = 2'-OMe modified nucleotide
  modified_base 15: mod_base = OTHER; note = 2'-OMe modified nucleotide
  modified_base 17: mod_base = OTHER; note = 2'-OMe modified nucleotide
  modified_base 2: mod_base = OTHER; note = 2-deoxy-2-fluoro ribonucleotide
  modified_base 4: mod_base = OTHER; note = 2-deoxy-2-fluoro ribonucleotide
  modified_base 6: mod_base = OTHER; note = 2-deoxy-2-fluoro ribonucleotide
  modified_base 8: mod_base = OTHER; note = 2-deoxy-2-fluoro ribonucleotide
  modified_base 10: mod_base = OTHER; note = 2-deoxy-2-fluoro ribonucleotide
  modified_base 12: mod_base = OTHER; note = 2-deoxy-2-fluoro ribonucleotide
  modified_base 14: mod_base = OTHER; note = 2-deoxy-2-fluoro ribonucleotide
  modified_base 16: mod_base = OTHER; note = 2-deoxy-2-fluoro ribonucleotide
  modified_base 18: mod_base = OTHER; note = 2-deoxy-2-fluoro ribonucleotide
  modified_base 1..2: mod_base = OTHER; note = phosphorothioate internucleotide linkage
  modified_base 2..3: mod_base = OTHER; note = phosphorothioate internucleotide linkage
tgagaatgagcctcgata

SEQ ID NO: 553 - RNA, 18 nt, synthetic construct
  source 1..18: mol_type = other RNA
  modified_base 1: mod_base = OTHER; note = 2'-OMe modified nucleotide
  modified_base 3: mod_base = OTHER; note = 2'-OMe modified nucleotide
  modified_base 5: mod_base = OTHER; note = 2'-OMe modified nucleotide
  modified_base 7: mod_base = OTHER; note = 2'-OMe modified nucleotide
  modified_base 9: mod_base = OTHER; note = 2'-OMe modified nucleotide
  modified_base 11: mod_base = OTHER; note = 2'-OMe modified nucleotide
  modified_base 13: mod_base = OTHER; note = 2'-OMe modified nucleotide
  modified_base 15: mod_base = OTHER; note = 2'-OMe modified nucleotide
  modified_base 17: mod_base = OTHER; note = 2'-OMe modified nucleotide
  modified_base 2: mod_base = OTHER; note = 2-deoxy-2-fluoro ribonucleotide
  modified_base 4: mod_base = OTHER; note = 2-deoxy-2-fluoro ribonucleotide
  modified_base 6: mod_base = OTHER; note = 2-deoxy-2-fluoro ribonucleotide
  modified_base 8: mod_base = OTHER; note = 2-deoxy-2-fluoro ribonucleotide
  modified_base 10: mod_base = OTHER; note = 2-deoxy-2-fluoro ribonucleotide
  modified_base 12: mod_base = OTHER; note = 2-deoxy-2-fluoro ribonucleotide
  modified_base 14: mod_base = OTHER; note = 2-deoxy-2-fluoro ribonucleotide
  modified_base 16: mod_base = OTHER; note = 2-deoxy-2-fluoro ribonucleotide
  modified_base 18: mod_base = OTHER; note = 2-deoxy-2-fluoro ribonucleotide
  modified_base 1..2: mod_base = OTHER; note = phosphorothioate internucleotide linkage
  modified_base 2..3: mod_base = OTHER; note = phosphorothioate internucleotide linkage
tccatttgggtagtattc

SEQ ID NO: 554 - RNA, 18 nt, synthetic construct
  source 1..18: mol_type = other RNA
  modified_base 1: mod_base = OTHER; note = 2'-OMe modified nucleotide
  modified_base 3: mod_base = OTHER; note = 2'-OMe modified nucleotide
  modified_base 5: mod_base = OTHER; note = 2'-OMe modified nucleotide
  modified_base 7: mod_base = OTHER; note = 2'-OMe modified nucleotide
  modified_base 9: mod_base = OTHER; note = 2'-OMe modified nucleotide
  modified_base 11: mod_base = OTHER; note = 2'-OMe modified nucleotide
  modified_base 13: mod_base = OTHER; note = 2'-OMe modified nucleotide
  modified_base 15: mod_base = OTHER; note = 2'-OMe modified nucleotide
  modified_base 17: mod_base = OTHER; note = 2'-OMe modified nucleotide
  modified_base 2: mod_base = OTHER; note = 2-deoxy-2-fluoro ribonucleotide
  modified_base 4: mod_base = OTHER; note = 2-deoxy-2-fluoro ribonucleotide
  modified_base 6: mod_base = OTHER; note = 2-deoxy-2-fluoro ribonucleotide
  modified_base 8: mod_base = OTHER; note = 2-deoxy-2-fluoro ribonucleotide
  modified_base 10: mod_base = OTHER; note = 2-deoxy-2-fluoro ribonucleotide
  modified_base 12: mod_base = OTHER; note = 2-deoxy-2-fluoro ribonucleotide
  modified_base 14: mod_base = OTHER; note = 2-deoxy-2-fluoro ribonucleotide
  modified_base 16: mod_base = OTHER; note = 2-deoxy-2-fluoro ribonucleotide
  modified_base 18: mod_base = OTHER; note = 2-deoxy-2-fluoro ribonucleotide
  modified_base 1..2: mod_base = OTHER; note = phosphorothioate internucleotide linkage
  modified_base 2..3: mod_base = OTHER; note = phosphorothioate internucleotide linkage
tcaccatttgggtagtat

SEQ ID NO: 555 - RNA, 18 nt, synthetic construct
  source 1..18: mol_type = other RNA
  modified_base 1: mod_base = OTHER; note = 2'-OMe modified nucleotide
  modified_base 3: mod_base = OTHER; note = 2'-OMe modified nucleotide
  modified_base 5: mod_base = OTHER; note = 2'-OMe modified nucleotide
  modified_base 7: mod_base = OTHER; note = 2'-OMe modified nucleotide
  modified_base 9: mod_base = OTHER; note = 2'-OMe modified nucleotide
  modified_base 11: mod_base = OTHER; note = 2'-OMe modified nucleotide
  modified_base 13: mod_base = OTHER; note = 2'-OMe modified nucleotide
  modified_base 15: mod_base = OTHER; note = 2'-OMe modified nucleotide
  modified_base 17: mod_base = OTHER; note = 2'-OMe modified nucleotide
  modified_base 2: mod_base = OTHER; note = 2-deoxy-2-fluoro ribonucleotide
  modified_base 4: mod_base = OTHER; note = 2-deoxy-2-fluoro ribonucleotide
  modified_base 6: mod_base = OTHER; note = 2-deoxy-2-fluoro ribonucleotide
  modified_base 8: mod_base = OTHER; note = 2-deoxy-2-fluoro ribonucleotide
  modified_base 10: mod_base = OTHER; note = 2-deoxy-2-fluoro ribonucleotide
  modified_base 12: mod_base = OTHER; note = 2-deoxy-2-fluoro ribonucleotide
  modified_base 14: mod_base = OTHER; note = 2-deoxy-2-fluoro ribonucleotide
  modified_base 16: mod_base = OTHER; note = 2-deoxy-2-fluoro ribonucleotide
  modified_base 18: mod_base = OTHER; note = 2-deoxy-2-fluoro ribonucleotide
  modified_base 1..2: mod_base = OTHER; note = phosphorothioate internucleotide linkage
  modified_base 2..3: mod_base = OTHER; note = phosphorothioate internucleotide linkage
tgacacctgattctgttt

SEQ ID NO: 556 - RNA, 18 nt, synthetic construct
  source 1..18: mol_type = other RNA
  modified_base 1: mod_base = OTHER; note = 2'-OMe modified nucleotide
  modified_base 3: mod_base = OTHER; note = 2'-OMe modified nucleotide
  modified_base 5: mod_base = OTHER; note = 2'-OMe modified nucleotide
  modified_base 7: mod_base = OTHER; note = 2'-OMe modified nucleotide
  modified_base 9: mod_base = OTHER; note = 2'-OMe modified nucleotide
  modified_base 11: mod_base = OTHER; note = 2'-OMe modified nucleotide
  modified_base 13: mod_base = OTHER; note = 2'-OMe modified nucleotide
  modified_base 15: mod_base = OTHER; note = 2'-OMe modified nucleotide
  modified_base 17: mod_base = OTHER; note = 2'-OMe modified nucleotide
  modified_base 2: mod_base = OTHER; note = 2-deoxy-2-fluoro ribonucleotide
  modified_base 4: mod_base = OTHER; note = 2-deoxy-2-fluoro ribonucleotide
  modified_base 6: mod_base = OTHER; note = 2-deoxy-2-fluoro ribonucleotide
  modified_base 8: mod_base = OTHER; note = 2-deoxy-2-fluoro ribonucleotide
  modified_base 10: mod_base = OTHER; note = 2-deoxy-2-fluoro ribonucleotide
  modified_base 12: mod_base = OTHER; note = 2-deoxy-2-fluoro ribonucleotide
  modified_base 14: mod_base = OTHER; note = 2-deoxy-2-fluoro ribonucleotide
  modified_base 16: mod_base = OTHER; note = 2-deoxy-2-fluoro ribonucleotide
  modified_base 18: mod_base = OTHER; note = 2-deoxy-2-fluoro ribonucleotide
  modified_base 1..2: mod_base = OTHER; note = phosphorothioate internucleotide linkage
  modified_base 2..3: mod_base = OTHER; note = phosphorothioate internucleotide linkage
tggacacctgattctgtt

SEQ ID NO: 557 - RNA, 17 nt, synthetic construct
  source 1..17: mol_type = other RNA
  modified_base 1: mod_base = OTHER; note = 2'-OMe modified nucleotide
  modified_base 3: mod_base = OTHER; note = 2'-OMe modified nucleotide
  modified_base 5: mod_base = OTHER; note = 2'-OMe modified nucleotide
  modified_base 7: mod_base = OTHER; note = 2'-OMe modified nucleotide
  modified_base 9: mod_base = OTHER; note = 2'-OMe modified nucleotide
  modified_base 11: mod_base = OTHER; note = 2'-OMe modified nucleotide
  modified_base 13: mod_base = OTHER; note = 2'-OMe modified nucleotide
  modified_base 15: mod_base = OTHER; note = 2'-OMe modified nucleotide
  modified_base 17: mod_base = OTHER; note = 2'-OMe modified nucleotide
  modified_base 2: mod_base = OTHER; note = 2-deoxy-2-fluoro ribonucleotide
  modified_base 4: mod_base = OTHER; note = 2-deoxy-2-fluoro ribonucleotide
  modified_base 6: mod_base = OTHER; note = 2-deoxy-2-fluoro ribonucleotide
  modified_base 8: mod_base = OTHER; note = 2-deoxy-2-fluoro ribonucleotide
  modified_base 10: mod_base = OTHER; note = 2-deoxy-2-fluoro ribonucleotide
  modified_base 12: mod_base = OTHER; note = 2-deoxy-2-fluoro ribonucleotide
  modified_base 14: mod_base = OTHER; note = 2-deoxy-2-fluoro ribonucleotide
  modified_base 16: mod_base = OTHER; note = 2-deoxy-2-fluoro ribonucleotide
  modified_base 1..2: mod_base = OTHER; note = phosphorothioate internucleotide linkage
  modified_base 2..3: mod_base = OTHER; note = phosphorothioate internucleotide linkage
ttaacaataaggggctg

SEQ ID NO: 558 - RNA, 17 nt, synthetic construct
  source 1..17: mol_type = other RNA
  modified_base 1: mod_base = OTHER; note = 2'-OMe modified nucleotide
  modified_base 3: mod_base = OTHER; note = 2'-OMe modified nucleotide
  modified_base 5: mod_base = OTHER; note = 2'-OMe modified nucleotide
  modified_base 7: mod_base = OTHER; note = 2'-OMe modified nucleotide
  modified_base 9: mod_base = OTHER; note = 2'-OMe modified nucleotide
  modified_base 11: mod_base = OTHER; note = 2'-OMe modified nucleotide
  modified_base 13: mod_base = OTHER; note = 2'-OMe modified nucleotide
  modified_base 15: mod_base = OTHER; note = 2'-OMe modified nucleotide
  modified_base 17: mod_base = OTHER; note = 2'-OMe modified nucleotide
  modified_base 2: mod_base = OTHER; note = 2-deoxy-2-fluoro ribonucleotide
  modified_base 4: mod_base = OTHER; note = 2-deoxy-2-fluoro ribonucleotide
  modified_base 6: mod_base = OTHER; note = 2-deoxy-2-fluoro ribonucleotide
  modified_base 8: mod_base = OTHER; note = 2-deoxy-2-fluoro ribonucleotide
  modified_base 10: mod_base = OTHER; note = 2-deoxy-2-fluoro ribonucleotide
  modified_base 12: mod_base = OTHER; note = 2-deoxy-2-fluoro ribonucleotide
  modified_base 14: mod_base = OTHER; note = 2-deoxy-2-fluoro ribonucleotide
  modified_base 16: mod_base = OTHER; note = 2-deoxy-2-fluoro ribonucleotide
  modified_base 1..2: mod_base = OTHER; note = phosphorothioate internucleotide linkage
  modified_base 2..3: mod_base = OTHER; note = phosphorothioate internucleotide linkage
tgtataacaataagggg

SEQ ID NO: 559 - RNA, 17 nt, synthetic construct
  source 1..17: mol_type = other RNA
  modified_base 1: mod_base = OTHER; note = 2'-OMe modified nucleotide
  modified_base 3: mod_base = OTHER; note = 2'-OMe modified nucleotide
  modified_base 5: mod_base = OTHER; note = 2'-OMe modified nucleotide
  modified_base 7: mod_base = OTHER; note = 2'-OMe modified nucleotide
  modified_base 9: mod_base = OTHER; note = 2'-OMe modified nucleotide
  modified_base 11: mod_base = OTHER; note = 2'-OMe modified nucleotide
  modified_base 13: mod_base = OTHER; note = 2'-OMe modified nucleotide
  modified_base 15: mod_base = OTHER; note = 2'-OMe modified nucleotide
  modified_base 17: mod_base = OTHER; note = 2'-OMe modified nucleotide
  modified_base 2: mod_base = OTHER; note = 2-deoxy-2-fluoro ribonucleotide
  modified_base 4: mod_base = OTHER; note = 2-deoxy-2-fluoro ribonucleotide
  modified_base 6: mod_base = OTHER; note = 2-deoxy-2-fluoro ribonucleotide
  modified_base 8: mod_base = OTHER; note = 2-deoxy-2-fluoro ribonucleotide
  modified_base 10: mod_base = OTHER; note = 2-deoxy-2-fluoro ribonucleotide
  modified_base 12: mod_base = OTHER; note = 2-deoxy-2-fluoro ribonucleotide
  modified_base 14: mod_base = OTHER; note = 2-deoxy-2-fluoro ribonucleotide
  modified_base 16: mod_base = OTHER; note = 2-deoxy-2-fluoro ribonucleotide
  modified_base 1..2: mod_base = OTHER; note = phosphorothioate internucleotide linkage
  modified_base 2..3: mod_base = OTHER; note = phosphorothioate internucleotide linkage
tcgtataacaataaggg

SEQ ID NO: 560 - RNA, 17 nt, synthetic construct
  source 1..17: mol_type = other RNA
  modified_base 1: mod_base = OTHER; note = 2'-OMe modified nucleotide
  modified_base 3: mod_base = OTHER; note = 2'-OMe modified nucleotide
  modified_base 5: mod_base = OTHER; note = 2'-OMe modified nucleotide
  modified_base 7: mod_base = OTHER; note = 2'-OMe modified nucleotide
  modified_base 9: mod_base = OTHER; note = 2'-OMe modified nucleotide
  modified_base 11: mod_base = OTHER; note = 2'-OMe modified nucleotide
  modified_base 13: mod_base = OTHER; note = 2'-OMe modified nucleotide
  modified_base 15: mod_base = OTHER; note = 2'-OMe modified nucleotide
  modified_base 17: mod_base = OTHER; note = 2'-OMe modified nucleotide
  modified_base 2: mod_base = OTHER; note = 2-deoxy-2-fluoro ribonucleotide
  modified_base 4: mod_base = OTHER; note = 2-deoxy-2-fluoro ribonucleotide
  modified_base 6: mod_base = OTHER; note = 2-deoxy-2-fluoro ribonucleotide
  modified_base 8: mod_base = OTHER; note = 2-deoxy-2-fluoro ribonucleotide
  modified_base 10: mod_base = OTHER; note = 2-deoxy-2-fluoro ribonucleotide
  modified_base 12: mod_base = OTHER; note = 2-deoxy-2-fluoro ribonucleotide
  modified_base 14: mod_base = OTHER; note = 2-deoxy-2-fluoro ribonucleotide
  modified_base 16: mod_base = OTHER; note = 2-deoxy-2-fluoro ribonucleotide
  modified_base 1..2: mod_base = OTHER; note = phosphorothioate internucleotide linkage
  modified_base 2..3: mod_base = OTHER; note = phosphorothioate internucleotide linkage
tgcgtctgagcattgtg

SEQ ID NO: 561 - RNA, 17 nt, synthetic construct
  source 1..17: mol_type = other RNA
  modified_base 1: mod_base = OTHER; note = 2'-OMe modified nucleotide
  modified_base 3: mod_base = OTHER; note = 2'-OMe modified nucleotide
  modified_base 5: mod_base = OTHER; note = 2'-OMe modified nucleotide
  modified_base 7: mod_base = OTHER; note = 2'-OMe modified nucleotide
  modified_base 9: mod_base = OTHER; note = 2'-OMe modified nucleotide
  modified_base 11: mod_base = OTHER; note = 2'-OMe modified nucleotide
  modified_base 13: mod_base = OTHER; note = 2'-OMe modified nucleotide
  modified_base 15: mod_base = OTHER; note = 2'-OMe modified nucleotide
  modified_base 17: mod_base = OTHER; note = 2'-OMe modified nucleotide
  modified_base 2: mod_base = OTHER; note = 2-deoxy-2-fluoro ribonucleotide
  modified_base 4: mod_base = OTHER; note = 2-deoxy-2-fluoro ribonucleotide
  modified_base 6: mod_base = OTHER; note = 2-deoxy-2-fluoro ribonucleotide
  modified_base 8: mod_base = OTHER; note = 2-deoxy-2-fluoro ribonucleotide
  modified_base 10: mod_base = OTHER; note = 2-deoxy-2-fluoro ribonucleotide
  modified_base 12: mod_base = OTHER; note = 2-deoxy-2-fluoro ribonucleotide
  modified_base 14: mod_base = OTHER; note = 2-deoxy-2-fluoro ribonucleotide
  modified_base 16: mod_base = OTHER; note = 2-deoxy-2-fluoro ribonucleotide
  modified_base 1..2: mod_base = OTHER; note = phosphorothioate internucleotide linkage
  modified_base 2..3: mod_base = OTHER; note = phosphorothioate internucleotide linkage
ttgcgtctgagcattgt

SEQ ID NO: 562 - RNA, 17 nt, synthetic construct
  source 1..17: mol_type = other RNA
  modified_base 1: mod_base = OTHER; note = 2'-OMe modified nucleotide
  modified_base 3: mod_base = OTHER; note = 2'-OMe modified nucleotide
  modified_base 5: mod_base = OTHER; note = 2'-OMe modified nucleotide
  modified_base 7: mod_base = OTHER; note = 2'-OMe modified nucleotide
  modified_base 9: mod_base = OTHER; note = 2'-OMe modified nucleotide
  modified_base 11: mod_base = OTHER; note = 2'-OMe modified nucleotide
  modified_base 13: mod_base = OTHER; note = 2'-OMe modified nucleotide
  modified_base 15: mod_base = OTHER; note = 2'-OMe modified nucleotide
  modified_base 17: mod_base = OTHER; note = 2'-OMe modified nucleotide
  modified_base 2: mod_base = OTHER; note = 2-deoxy-2-fluoro ribonucleotide
  modified_base 4: mod_base = OTHER; note = 2-deoxy-2-fluoro ribonucleotide
  modified_base 6: mod_base = OTHER; note = 2-deoxy-2-fluoro ribonucleotide
  modified_base 8: mod_base = OTHER; note = 2-deoxy-2-fluoro ribonucleotide
  modified_base 10: mod_base = OTHER; note = 2-deoxy-2-fluoro ribonucleotide
  modified_base 12: mod_base = OTHER; note = 2-deoxy-2-fluoro ribonucleotide
  modified_base 14: mod_base = OTHER; note = 2-deoxy-2-fluoro ribonucleotide
  modified_base 16: mod_base = OTHER; note = 2-deoxy-2-fluoro ribonucleotide
  modified_base 1..2: mod_base = OTHER; note = phosphorothioate internucleotide linkage
  modified_base 2..3: mod_base = OTHER; note = phosphorothioate internucleotide linkage
tcaggatctggatttcg

SEQ ID NO: 563 - RNA, 17 nt, synthetic construct
  source 1..17: mol_type = other RNA
  modified_base 1: mod_base = OTHER; note = 2'-OMe modified nucleotide
  modified_base 3: mod_base = OTHER; note = 2'-OMe modified nucleotide
  modified_base 5: mod_base = OTHER; note = 2'-OMe modified nucleotide
  modified_base 7: mod_base = OTHER; note = 2'-OMe modified nucleotide
  modified_base 9: mod_base = OTHER; note = 2'-OMe modified nucleotide
  modified_base 11: mod_base = OTHER; note = 2'-OMe modified nucleotide
  modified_base 13: mod_base = OTHER; note = 2'-OMe modified nucleotide
  modified_base 15: mod_base = OTHER; note = 2'-OMe modified nucleotide
  modified_base 17: mod_base = OTHER; note = 2'-OMe modified nucleotide
  modified_base 2: mod_base = OTHER; note = 2-deoxy-2-fluoro ribonucleotide
  modified_base 4: mod_base = OTHER; note = 2-deoxy-2-fluoro ribonucleotide
  modified_base 6: mod_base = OTHER; note = 2-deoxy-2-fluoro ribonucleotide
  modified_base 8: mod_base = OTHER; note = 2-deoxy-2-fluoro ribonucleotide
  modified_base 10: mod_base = OTHER; note = 2-deoxy-2-fluoro ribonucleotide
  modified_base 12: mod_base = OTHER; note = 2-deoxy-2-fluoro ribonucleotide
  modified_base 14: mod_base = OTHER; note = 2-deoxy-2-fluoro ribonucleotide
  modified_base 16: mod_base = OTHER; note = 2-deoxy-2-fluoro ribonucleotide
  modified_base 1..2: mod_base = OTHER; note = phosphorothioate internucleotide linkage
  modified_base 2..3: mod_base = OTHER; note = phosphorothioate internucleotide linkage
ttgcatctgagcatcgt

SEQ ID NO: 564 - RNA, 17 nt, synthetic construct
  source 1..17: mol_type = other RNA
  modified_base 1: mod_base = OTHER; note = 2'-OMe modified nucleotide
  modified_base 3: mod_base = OTHER; note = 2'-OMe modified nucleotide
  modified_base 5: mod_base = OTHER; note = 2'-OMe modified nucleotide
  modified_base 7: mod_base = OTHER; note = 2'-OMe modified nucleotide
  modified_base 9: mod_base = OTHER; note = 2'-OMe modified nucleotide
  modified_base 11: mod_base = OTHER; note = 2'-OMe modified nucleotide
  modified_base 13: mod_base = OTHER; note = 2'-OMe modified nucleotide
  modified_base 15: mod_base = OTHER; note = 2'-OMe modified nucleotide
  modified_base 17: mod_base = OTHER; note = 2'-OMe modified nucleotide
  modified_base 2: mod_base = OTHER; note = 2-deoxy-2-fluoro ribonucleotide
  modified_base 4: mod_base = OTHER; note = 2-deoxy-2-fluoro ribonucleotide
  modified_base 6: mod_base = OTHER; note = 2-deoxy-2-fluoro ribonucleotide
  modified_base 8: mod_base = OTHER; note = 2-deoxy-2-fluoro ribonucleotide
  modified_base 10: mod_base = OTHER; note = 2-deoxy-2-fluoro ribonucleotide
  modified_base 12: mod_base = OTHER; note = 2-deoxy-2-fluoro ribonucleotide
  modified_base 14: mod_base = OTHER; note = 2-deoxy-2-fluoro ribonucleotide
  modified_base 16: mod_base = OTHER; note = 2-deoxy-2-fluoro ribonucleotide
  modified_base 1..2: mod_base = OTHER; note = phosphorothioate internucleotide linkage
  modified_base 2..3: mod_base = OTHER; note = phosphorothioate internucleotide linkage
tcgactatgctggtgtg

SEQ ID NO: 565 - RNA, 17 nt, synthetic construct
  source 1..17: mol_type = other RNA
  modified_base 1: mod_base = OTHER; note = 2'-OMe modified nucleotide
  modified_base 3: mod_base = OTHER; note = 2'-OMe modified nucleotide
  modified_base 5: mod_base = OTHER; note = 2'-OMe modified nucleotide
  modified_base 7: mod_base = OTHER; note = 2'-OMe modified nucleotide
  modified_base 9: mod_base = OTHER; note = 2'-OMe modified nucleotide
  modified_base 11: mod_base = OTHER; note = 2'-OMe modified nucleotide
  modified_base 13: mod_base = OTHER; note = 2'-OMe modified nucleotide
  modified_base 15: mod_base = OTHER; note = 2'-OMe modified nucleotide
  modified_base 17: mod_base = OTHER; note = 2'-OMe modified nucleotide
  modified_base 2: mod_base = OTHER; note = 2-deoxy-2-fluoro ribonucleotide
  modified_base 4: mod_base = OTHER; note = 2-deoxy-2-fluoro ribonucleotide
  modified_base 6: mod_base = OTHER; note = 2-deoxy-2-fluoro ribonucleotide
  modified_base 8: mod_base = OTHER; note = 2-deoxy-2-fluoro ribonucleotide
  modified_base 10: mod_base = OTHER; note = 2-deoxy-2-fluoro ribonucleotide
  modified_base 12: mod_base = OTHER; note = 2-deoxy-2-fluoro ribonucleotide
  modified_base 14: mod_base = OTHER; note = 2-deoxy-2-fluoro ribonucleotide
  modified_base 16: mod_base = OTHER; note = 2-deoxy-2-fluoro ribonucleotide
  modified_base 1..2: mod_base = OTHER; note = phosphorothioate internucleotide linkage
  modified_base 2..3: mod_base = OTHER; note = phosphorothioate internucleotide linkage
ttttctggggtccgact

SEQ ID NO: 566 - RNA, 17 nt, synthetic construct
  source 1..17: mol_type = other RNA
  modified_base 1: mod_base = OTHER; note = 2'-OMe modified nucleotide
  modified_base 3: mod_base = OTHER; note = 2'-OMe modified nucleotide
  modified_base 5: mod_base = OTHER; note = 2'-OMe modified nucleotide
  modified_base 7: mod_base = OTHER; note = 2'-OMe modified nucleotide
  modified_base 9: mod_base = OTHER; note = 2'-OMe modified nucleotide
  modified_base 11: mod_base = OTHER; note = 2'-OMe modified nucleotide
  modified_base 13: mod_base = OTHER; note = 2'-OMe modified nucleotide
  modified_base 15: mod_base = OTHER; note = 2'-OMe modified nucleotide
  modified_base 17: mod_base = OTHER; note = 2'-OMe modified nucleotide
  modified_base 2: mod_base = OTHER; note = 2-deoxy-2-fluoro ribonucleotide
  modified_base 4: mod_base = OTHER; note = 2-deoxy-2-fluoro ribonucleotide
  modified_base 6: mod_base = OTHER; note = 2-deoxy-2-fluoro ribonucleotide
  modified_base 8: mod_base = OTHER; note = 2-deoxy-2-fluoro ribonucleotide
  modified_base 10: mod_base = OTHER; note = 2-deoxy-2-fluoro ribonucleotide
  modified_base 12: mod_base = OTHER; note = 2-deoxy-2-fluoro ribonucleotide
  modified_base 14: mod_base = OTHER; note = 2-deoxy-2-fluoro ribonucleotide
  modified_base 16: mod_base = OTHER; note = 2-deoxy-2-fluoro ribonucleotide
  modified_base 1..2: mod_base = OTHER; note = phosphorothioate internucleotide linkage
  modified_base 2..3: mod_base = OTHER; note = phosphorothioate internucleotide linkage
tgcgaatctcagcatct

SEQ ID NO: 567 - RNA, 17 nt, synthetic construct
  source 1..17: mol_type = other RNA
  modified_base 1: mod_base = OTHER; note = 2'-OMe modified nucleotide
  modified_base 3: mod_base = OTHER; note = 2'-OMe modified nucleotide
  modified_base 5: mod_base = OTHER; note = 2'-OMe modified nucleotide
  modified_base 7: mod_base = OTHER; note = 2'-OMe modified nucleotide
  modified_base 9: mod_base = OTHER; note = 2'-OMe modified nucleotide
  modified_base 11: mod_base = OTHER; note = 2'-OMe modified nucleotide
  modified_base 13: mod_base = OTHER; note = 2'-OMe modified nucleotide
  modified_base 15: mod_base = OTHER; note = 2'-OMe modified nucleotide
  modified_base 17: mod_base = OTHER; note = 2'-OMe modified nucleotide
  modified_base 2: mod_base = OTHER; note = 2-deoxy-2-fluoro ribonucleotide
  modified_base 4: mod_base = OTHER; note = 2-deoxy-2-fluoro ribonucleotide
  modified_base 6: mod_base = OTHER; note = 2-deoxy-2-fluoro ribonucleotide
  modified_base 8: mod_base = OTHER; note = 2-deoxy-2-fluoro ribonucleotide
  modified_base 10: mod_base = OTHER; note = 2-deoxy-2-fluoro ribonucleotide
  modified_base 12: mod_base = OTHER; note = 2-deoxy-2-fluoro ribonucleotide
  modified_base 14: mod_base = OTHER; note = 2-deoxy-2-fluoro ribonucleotide
  modified_base 16: mod_base = OTHER; note = 2-deoxy-2-fluoro ribonucleotide
  modified_base 1..2: mod_base = OTHER; note = phosphorothioate internucleotide linkage
  modified_base 2..3: mod_base = OTHER; note = phosphorothioate internucleotide linkage
ttgcaaggacacttgat

SEQ ID NO: 568 - RNA, 17 nt, synthetic construct
  source 1..17: mol_type = other RNA
  modified_base 1: mod_base = OTHER; note = 2'-OMe modified nucleotide
  modified_base 3: mod_base = OTHER; note = 2'-OMe modified nucleotide
  modified_base 5: mod_base = OTHER; note = 2'-OMe modified nucleotide
  modified_base 7: mod_base = OTHER; note = 2'-OMe modified nucleotide
  modified_base 9: mod_base = OTHER; note = 2'-OMe modified nucleotide
  modified_base 11: mod_base = OTHER; note = 2'-OMe modified nucleotide
  modified_base 13: mod_base = OTHER; note = 2'-OMe modified nucleotide
  modified_base 15: mod_base = OTHER; note = 2'-OMe modified nucleotide
  modified_base 17: mod_base = OTHER; note = 2'-OMe modified nucleotide
  modified_base 2: mod_base = OTHER; note = 2-deoxy-2-fluoro ribonucleotide
  modified_base 4: mod_base = OTHER; note = 2-deoxy-2-fluoro ribonucleotide
  modified_base 6: mod_base = OTHER; note = 2-deoxy-2-fluoro ribonucleotide
  modified_base 8: mod_base = OTHER; note = 2-deoxy-2-fluoro ribonucleotide
  modified_base 10: mod_base = OTHER; note = 2-deoxy-2-fluoro ribonucleotide
  modified_base 12: mod_base = OTHER; note = 2-deoxy-2-fluoro ribonucleotide
  modified_base 14: mod_base = OTHER; note = 2-deoxy-2-fluoro ribonucleotide
  modified_base 16: mod_base = OTHER; note = 2-deoxy-2-fluoro ribonucleotide
  modified_base 1..2: mod_base = OTHER; note = phosphorothioate internucleotide linkage
  modified_base 2..3: mod_base = OTHER; note = phosphorothioate internucleotide linkage
taatgagcctcgataac

SEQ ID NO: 569 - RNA, 17 nt, synthetic construct
  source 1..17: mol_type = other RNA
  modified_base 1: mod_base = OTHER; note = 2'-OMe modified nucleotide
  modified_base 3: mod_base = OTHER; note = 2'-OMe modified nucleotide
  modified_base 5: mod_base = OTHER; note = 2'-OMe modified nucleotide
  modified_base 7: mod_base = OTHER; note = 2'-OMe modified nucleotide
  modified_base 9: mod_base = OTHER; note = 2'-OMe modified nucleotide
  modified_base 11: mod_base = OTHER; note = 2'-OMe modified nucleotide
  modified_base 13: mod_base = OTHER; note = 2'-OMe modified nucleotide
  modified_base 15: mod_base = OTHER; note = 2'-OMe modified nucleotide
  modified_base 17: mod_base = OTHER; note = 2'-OMe modified nucleotide
  modified_base 2: mod_base = OTHER; note = 2-deoxy-2-fluoro ribonucleotide
  modified_base 4: mod_base = OTHER; note = 2-deoxy-2-fluoro ribonucleotide
  modified_base 6: mod_base = OTHER; note = 2-deoxy-2-fluoro ribonucleotide
  modified_base 8: mod_base = OTHER; note = 2-deoxy-2-fluoro ribonucleotide
  modified_base 10: mod_base = OTHER; note = 2-deoxy-2-fluoro ribonucleotide
  modified_base 12: mod_base = OTHER; note = 2-deoxy-2-fluoro ribonucleotide
  modified_base 14: mod_base = OTHER; note = 2-deoxy-2-fluoro ribonucleotide
  modified_base 16: mod_base = OTHER; note = 2-deoxy-2-fluoro ribonucleotide
  modified_base 1..2: mod_base = OTHER; note = phosphorothioate internucleotide linkage
  modified_base 2..3: mod_base = OTHER; note = phosphorothioate internucleotide linkage
tgaatgagcctcgataa

SEQ ID NO: 570 - RNA, 17 nt, synthetic construct
  source 1..17: mol_type = other RNA
  modified_base 1: mod_base = OTHER; note = 2'-OMe modified nucleotide
  modified_base 3: mod_base = OTHER; note = 2'-OMe modified nucleotide
  modified_base 5: mod_base = OTHER; note = 2'-OMe modified nucleotide
  modified_base 7: mod_base = OTHER; note = 2'-OMe modified nucleotide
  modified_base 9: mod_base = OTHER; note = 2'-OMe modified nucleotide
  modified_base 11: mod_base = OTHER; note = 2'-OMe modified nucleotide
  modified_base 13: mod_base = OTHER; note = 2'-OMe modified nucleotide
  modified_base 15: mod_base = OTHER; note = 2'-OMe modified nucleotide
  modified_base 17: mod_base = OTHER; note = 2'-OMe modified nucleotide
  modified_base 2: mod_base = OTHER; note = 2-deoxy-2-fluoro ribonucleotide
  modified_base 4: mod_base = OTHER; note = 2-deoxy-2-fluoro ribonucleotide
  modified_base 6: mod_base = OTHER; note = 2-deoxy-2-fluoro ribonucleotide
  modified_base 8: mod_base = OTHER; note = 2-deoxy-2-fluoro ribonucleotide
  modified_base 10: mod_base = OTHER; note = 2-deoxy-2-fluoro ribonucleotide
  modified_base 12: mod_base = OTHER; note = 2-deoxy-2-fluoro ribonucleotide
  modified_base 14: mod_base = OTHER; note = 2-deoxy-2-fluoro ribonucleotide
  modified_base 16: mod_base = OTHER; note = 2-deoxy-2-fluoro ribonucleotide
  modified_base 1..2: mod_base = OTHER; note = phosphorothioate internucleotide linkage
  modified_base 2..3: mod_base = OTHER; note = phosphorothioate internucleotide linkage
tgacattgtgtcaggtt

SEQ ID NO: 571 - RNA, 17 nt, synthetic construct
  source 1..17: mol_type = other RNA
  modified_base 1: mod_base = OTHER; note = 2'-OMe modified nucleotide
  modified_base 3: mod_base = OTHER; note = 2'-OMe modified nucleotide
  modified_base 5: mod_base = OTHER; note = 2'-OMe modified nucleotide
  modified_base 7: mod_base = OTHER; note = 2'-OMe modified nucleotide
  modified_base 9: mod_base = OTHER; note = 2'-OMe modified nucleotide
  modified_base 11: mod_base = OTHER; note = 2'-OMe modified nucleotide
  modified_base 13: mod_base = OTHER; note = 2'-OMe modified nucleotide
  modified_base 15: mod_base = OTHER; note = 2'-OMe modified nucleotide
  modified_base 17: mod_base = OTHER; note = 2'-OMe modified nucleotide
  modified_base 2: mod_base = OTHER; note = 2-deoxy-2-fluoro ribonucleotide
  modified_base 4: mod_base = OTHER; note = 2-deoxy-2-fluoro ribonucleotide
  modified_base 6: mod_base = OTHER; note = 2-deoxy-2-fluoro ribonucleotide
  modified_base 8: mod_base = OTHER; note = 2-deoxy-2-fluoro ribonucleotide
  modified_base 10: mod_base = OTHER; note = 2-deoxy-2-fluoro ribonucleotide
  modified_base 12: mod_base = OTHER; note = 2-deoxy-2-fluoro ribonucleotide
  modified_base 14: mod_base = OTHER; note = 2-deoxy-2-fluoro ribonucleotide
  modified_base 16: mod_base = OTHER; note = 2-deoxy-2-fluoro ribonucleotide
  modified_base 1..2: mod_base = OTHER; note = phosphorothioate internucleotide linkage
  modified_base 2..3: mod_base = OTHER; note = phosphorothioate internucleotide linkage
tgagaatgagcctcgat

SEQ ID NO: 572 - RNA, 17 nt, synthetic construct
  source 1..17: mol_type = other RNA
  modified_base 1: mod_base = OTHER; note = 2'-OMe modified nucleotide
  modified_base 3: mod_base = OTHER; note = 2'-OMe modified nucleotide
  modified_base 5: mod_base = OTHER; note = 2'-OMe modified nucleotide
  modified_base 7: mod_base = OTHER; note = 2'-OMe modified nucleotide
  modified_base 9: mod_base = OTHER; note = 2'-OMe modified nucleotide
  modified_base 11: mod_base = OTHER; note = 2'-OMe modified nucleotide
  modified_base 13: mod_base = OTHER; note = 2'-OMe modified nucleotide
  modified_base 15: mod_base = OTHER; note = 2'-OMe modified nucleotide
  modified_base 17: mod_base = OTHER; note = 2'-OMe modified nucleotide
  modified_base 2: mod_base = OTHER; note = 2-deoxy-2-fluoro ribonucleotide
  modified_base 4: mod_base = OTHER; note = 2-deoxy-2-fluoro ribonucleotide
  modified_base 6: mod_base = OTHER; note = 2-deoxy-2-fluoro ribonucleotide
  modified_base 8: mod_base = OTHER; note = 2-deoxy-2-fluoro ribonucleotide
  modified_base 10: mod_base = OTHER; note = 2-deoxy-2-fluoro ribonucleotide
  modified_base 12: mod_base = OTHER; note = 2-deoxy-2-fluoro ribonucleotide
  modified_base 14: mod_base = OTHER; note = 2-deoxy-2-fluoro ribonucleotide
  modified_base 16: mod_base = OTHER; note = 2-deoxy-2-fluoro ribonucleotide
  modified_base 1..2: mod_base = OTHER; note = phosphorothioate internucleotide linkage
  modified_base 2..3: mod_base = OTHER; note = phosphorothioate internucleotide linkage
tccatttgggtagtatt

SEQ ID NO: 573 - RNA, 17 nt, synthetic construct
  source 1..17: mol_type = other RNA
  modified_base 1: mod_base = OTHER; note = 2'-OMe modified nucleotide
  modified_base 3: mod_base = OTHER; note = 2'-OMe modified nucleotide
  modified_base 5: mod_base = OTHER; note = 2'-OMe modified nucleotide
  modified_base 7: mod_base = OTHER; note = 2'-OMe modified nucleotide
  modified_base 9: mod_base = OTHER; note = 2'-OMe modified nucleotide
  modified_base 11: mod_base = OTHER; note = 2'-OMe modified nucleotide
  modified_base 13: mod_base = OTHER; note = 2'-OMe modified nucleotide
  modified_base 15: mod_base = OTHER; note = 2'-OMe modified nucleotide
  modified_base 17: mod_base = OTHER; note = 2'-OMe modified nucleotide
  modified_base 2: mod_base = OTHER; note = 2-deoxy-2-fluoro ribonucleotide
  modified_base 4: mod_base = OTHER; note = 2-deoxy-2-fluoro ribonucleotide
  modified_base 6: mod_base = OTHER; note = 2-deoxy-2-fluoro ribonucleotide
  modified_base 8: mod_base = OTHER; note = 2-deoxy-2-fluoro ribonucleotide
  modified_base 10: mod_base = OTHER; note = 2-deoxy-2-fluoro ribonucleotide
  modified_base 12: mod_base = OTHER; note = 2-deoxy-2-fluoro ribonucleotide
  modified_base 14: mod_base = OTHER; note = 2-deoxy-2-fluoro ribonucleotide
  modified_base 16: mod_base = OTHER; note = 2-deoxy-2-fluoro ribonucleotide
  modified_base 1..2: mod_base = OTHER; note = phosphorothioate internucleotide linkage
  modified_base 2..3: mod_base = OTHER; note = phosphorothioate internucleotide linkage
tcaccatttgggtagta

SEQ ID NO: 574 - RNA, 17 nt, synthetic construct
  source 1..17: mol_type = other RNA
  modified_base 1: mod_base = OTHER; note = 2'-OMe modified nucleotide
  modified_base 3: mod_base = OTHER; note = 2'-OMe modified nucleotide
  modified_base 5: mod_base = OTHER; note = 2'-OMe modified nucleotide
  modified_base 7: mod_base = OTHER; note = 2'-OMe modified nucleotide
  modified_base 9: mod_base = OTHER; note = 2'-OMe modified nucleotide
  modified_base 11: mod_base = OTHER; note = 2'-OMe modified nucleotide
  modified_base 13: mod_base = OTHER; note = 2'-OMe modified nucleotide
  modified_base 15: mod_base = OTHER; note = 2'-OMe modified nucleotide
  modified_base 17: mod_base = OTHER; note = 2'-OMe modified nucleotide
  modified_base 2: mod_base = OTHER; note = 2-deoxy-2-fluoro ribonucleotide
  modified_base 4: mod_base = OTHER; note = 2-deoxy-2-fluoro ribonucleotide
  modified_base 6: mod_base = OTHER; note = 2-deoxy-2-fluoro ribonucleotide
  modified_base 8: mod_base = OTHER; note = 2-deoxy-2-fluoro ribonucleotide
  modified_base 10: mod_base = OTHER; note = 2-deoxy-2-fluoro ribonucleotide
  modified_base 12: mod_base = OTHER; note = 2-deoxy-2-fluoro ribonucleotide
  modified_base 14: mod_base = OTHER; note = 2-deoxy-2-fluoro ribonucleotide
  modified_base 16: mod_base = OTHER; note = 2-deoxy-2-fluoro ribonucleotide
  modified_base 1..2: mod_base = OTHER; note = phosphorothioate internucleotide linkage
  modified_base 2..3: mod_base = OTHER; note = phosphorothioate internucleotide linkage
tgacacctgattctgtt

SEQ ID NO: 575 - RNA, 17 nt, synthetic construct
  source 1..17: mol_type = other RNA
  modified_base 1: mod_base = OTHER; note = 2'-OMe modified nucleotide
  modified_base 3: mod_base = OTHER; note = 2'-OMe modified nucleotide
  modified_base 5: mod_base = OTHER; note = 2'-OMe modified nucleotide
  modified_base 7: mod_base = OTHER; note = 2'-OMe modified nucleotide
  modified_base 9: mod_base = OTHER; note = 2'-OMe modified nucleotide
  modified_base 11: mod_base = OTHER; note = 2'-OMe modified nucleotide
  modified_base 13: mod_base = OTHER; note = 2'-OMe modified nucleotide
  modified_base 15: mod_base = OTHER; note = 2'-OMe modified nucleotide
  modified_base 17: mod_base = OTHER; note = 2'-OMe modified nucleotide
  modified_base 2: mod_base = OTHER; note = 2-deoxy-2-fluoro ribonucleotide
  modified_base 4: mod_base = OTHER; note = 2-deoxy-2-fluoro ribonucleotide
  modified_base 6: mod_base = OTHER; note = 2-deoxy-2-fluoro ribonucleotide
  modified_base 8: mod_base = OTHER; note = 2-deoxy-2-fluoro ribonucleotide
  modified_base 10: mod_base = OTHER; note = 2-deoxy-2-fluoro ribonucleotide
  modified_base 12: mod_base = OTHER; note = 2-deoxy-2-fluoro ribonucleotide
  modified_base 14: mod_base = OTHER; note = 2-deoxy-2-fluoro ribonucleotide
  modified_base 16: mod_base = OTHER; note = 2-deoxy-2-fluoro ribonucleotide
  modified_base 1..2: mod_base = OTHER; note = phosphorothioate internucleotide linkage
  modified_base 2..3: mod_base = OTHER; note = phosphorothioate internucleotide linkage
tggacacctgattctgt

SEQ ID NO: 576 - RNA, 26 nt, synthetic construct
  source 1..26: mol_type = other RNA
  modified_base 1: mod_base = OTHER; note = 2'-OMe modified nucleotide
  modified_base 3: mod_base = OTHER; note = 2'-OMe modified nucleotide
  modified_base 5: mod_base = OTHER; note = 2'-OMe modified nucleotide
  modified_base 7: mod_base = OTHER; note = 2'-OMe modified nucleotide
  modified_base 9: mod_base = OTHER; note = 2'-OMe modified nucleotide
  modified_base 11: mod_base = OTHER; note = 2'-OMe modified nucleotide
  modified_base 12: mod_base = OTHER; note = 2'-OMe modified nucleotide
  modified_base 13: mod_base = OTHER; note = 2'-OMe modified nucleotide
  modified_base 15: mod_base = OTHER; note = 2'-OMe modified nucleotide
  modified_base 17: mod_base = OTHER; note = 2'-OMe modified nucleotide
  modified_base 19: mod_base = OTHER; note = 2'-OMe modified nucleotide
  modified_base 21: mod_base = OTHER; note = 2'-OMe modified nucleotide
  modified_base 23: mod_base = OTHER; note = 2'-OMe modified nucleotide
  modified_base 24: mod_base = OTHER; note = 2'-OMe modified nucleotide
  modified_base 26: mod_base = OTHER; note = 2'-OMe modified nucleotide
  modified_base 2: mod_base = OTHER; note = 2-deoxy-2-fluoro ribonucleotide
  modified_base 4: mod_base = OTHER; note = 2-deoxy-2-fluoro ribonucleotide
  modified_base 6: mod_base = OTHER; note = 2-deoxy-2-fluoro ribonucleotide
  modified_base 8: mod_base = OTHER; note = 2-deoxy-2-fluoro ribonucleotide
  modified_base 10: mod_base = OTHER; note = 2-deoxy-2-fluoro ribonucleotide
  modified_base 14: mod_base = OTHER; note = 2-deoxy-2-fluoro ribonucleotide
  modified_base 16: mod_base = OTHER; note = 2-deoxy-2-fluoro ribonucleotide
  modified_base 18: mod_base = OTHER; note = 2-deoxy-2-fluoro ribonucleotide
  modified_base 20: mod_base = OTHER; note = 2-deoxy-2-fluoro ribonucleotide
  modified_base 22: mod_base = OTHER; note = 2-deoxy-2-fluoro ribonucleotide
  modified_base 1..2: mod_base = OTHER; note = phosphorothioate internucleotide linkage
  modified_base 2..3: mod_base = OTHER; note = phosphorothioate internucleotide linkage
  modified_base 22..23: mod_base = OTHER; note = phosphorothioate internucleotide linkage
  modified_base 23..24: mod_base = OTHER; note = phosphorothioate internucleotide linkage
tgagaatgagcctcgataactcttat

SEQ ID NO: 577 - RNA, 26 nt, synthetic construct
  source 1..26: mol_type = other RNA
  modified_base 1: mod_base = OTHER; note = 2'-OMe modified nucleotide
  modified_base 2: mod_base = OTHER; note = 2'-OMe modified nucleotide
  modified_base 3: mod_base = OTHER; note = 2'-OMe modified nucleotide
  modified_base 5: mod_base = OTHER; note = 2'-OMe modified nucleotide
  modified_base 7: mod_base = OTHER; note = 2'-OMe modified nucleotide
  modified_base 9: mod_base = OTHER; note = 2'-OMe modified nucleotide
  modified_base 11: mod_base = OTHER; note = 2'-OMe modified nucleotide
  modified_base 12: mod_base = OTHER; note = 2'-OMe modified nucleotide
  modified_base 13: mod_base = OTHER; note = 2'-OMe modified nucleotide
  modified_base 15: mod_base = OTHER; note = 2'-OMe modified nucleotide
  modified_base 17: mod_base = OTHER; note = 2'-OMe modified nucleotide
  modified_base 19: mod_base = OTHER; note = 2'-OMe modified nucleotide
  modified_base 21: mod_base = OTHER; note = 2'-OMe modified nucleotide
  modified_base 23: mod_base = OTHER; note = 2'-OMe modified nucleotide
  modified_base 24: mod_base = OTHER; note = 2'-OMe modified nucleotide
  modified_base 26: mod_base = OTHER; note = 2'-OMe modified nucleotide
  modified_base 4: mod_base = OTHER; note = 2-deoxy-2-fluoro ribonucleotide
  modified_base 6: mod_base = OTHER; note = 2-deoxy-2-fluoro ribonucleotide
  modified_base 8: mod_base = OTHER; note = 2-deoxy-2-fluoro ribonucleotide
  modified_base 10: mod_base = OTHER; note = 2-deoxy-2-fluoro ribonucleotide
  modified_base 14: mod_base = OTHER; note = 2-deoxy-2-fluoro ribonucleotide
  modified_base 16: mod_base = OTHER; note = 2-deoxy-2-fluoro ribonucleotide
  modified_base 18: mod_base = OTHER; note = 2-deoxy-2-fluoro ribonucleotide
  modified_base 20: mod_base = OTHER; note = 2-deoxy-2-fluoro ribonucleotide
  modified_base 22: mod_base = OTHER; note = 2-deoxy-2-fluoro ribonucleotide
  modified_base 1..2: mod_base = OTHER; note = phosphorothioate internucleotide linkage
  modified_base 2..3: mod_base = OTHER; note = phosphorothioate internucleotide linkage
  modified_base 22..23: mod_base = OTHER; note = phosphorothioate internucleotide linkage
  modified_base 23..24: mod_base = OTHER; note = phosphorothioate internucleotide linkage
tgagaatgagcctcgataactcttat

SEQ ID NO: 578 - RNA, 26 nt, synthetic construct
  source 1..26: mol_type = other RNA
  modified_base 1: mod_base = OTHER; note = 2'-OMe modified nucleotide
  modified_base 2: mod_base = OTHER; note = 2'-OMe modified nucleotide
  modified_base 3: mod_base = OTHER; note = 2'-OMe modified nucleotide
  modified_base 5: mod_base = OTHER; note = 2'-OMe modified nucleotide
  modified_base 7: mod_base = OTHER; note = 2'-OMe modified nucleotide
  modified_base 9: mod_base = OTHER; note = 2'-OMe modified nucleotide
  modified_base 11: mod_base = OTHER; note = 2'-OMe modified nucleotide
  modified_base 12: mod_base = OTHER; note = 2'-OMe modified nucleotide
  modified_base 13: mod_base = OTHER; note = 2'-OMe modified nucleotide
  modified_base 15: mod_base = OTHER; note = 2'-OMe modified nucleotide
  modified_base 17: mod_base = OTHER; note = 2'-OMe modified nucleotide
  modified_base 19: mod_base = OTHER; note = 2'-OMe modified nucleotide
  modified_base 21: mod_base = OTHER; note = 2'-OMe modified nucleotide
  modified_base 22: mod_base = OTHER; note = 2'-OMe modified nucleotide
  modified_base 23: mod_base = OTHER; note = 2'-OMe modified nucleotide
  modified_base 24: mod_base = OTHER; note = 2'-OMe modified nucleotide
  modified_base 26: mod_base = OTHER; note = 2'-OMe modified nucleotide
  modified_base 4: mod_base = OTHER; note = 2-deoxy-2-fluoro ribonucleotide
  modified_base 6: mod_base = OTHER; note = 2-deoxy-2-fluoro ribonucleotide
  modified_base 8: mod_base = OTHER; note = 2-deoxy-2-fluoro ribonucleotide
  modified_base 10: mod_base = OTHER; note = 2-deoxy-2-fluoro ribonucleotide
  modified_base 14: mod_base = OTHER; note = 2-deoxy-2-fluoro ribonucleotide
  modified_base 16: mod_base = OTHER; note = 2-deoxy-2-fluoro ribonucleotide
  modified_base 18: mod_base = OTHER; note = 2-deoxy-2-fluoro ribonucleotide
  modified_base 20: mod_base = OTHER; note = 2-deoxy-2-fluoro ribonucleotide
  modified_base 1..2: mod_base = OTHER; note = phosphorothioate internucleotide linkage
  modified_base 2..3: mod_base = OTHER; note = phosphorothioate internucleotide linkage
  modified_base 22..23: mod_base = OTHER; note = phosphorothioate internucleotide linkage
  modified_base 23..24: mod_base = OTHER; note = phosphorothioate internucleotide linkage
tgagaatgagcctcgataactcttat

SEQ ID NO: 579 - RNA, 26 nt, synthetic construct
  source 1..26: mol_type = other RNA
  modified_base 1: mod_base = OTHER; note = 2'-OMe modified nucleotide
  modified_base 3: mod_base = OTHER; note = 2'-OMe modified nucleotide
  modified_base 5: mod_base = OTHER; note = 2'-OMe modified nucleotide
  modified_base 7: mod_base = OTHER; note = 2'-OMe modified nucleotide
  modified_base 9: mod_base = OTHER; note = 2'-OMe modified nucleotide
  modified_base 11: mod_base = OTHER; note = 2'-OMe modified nucleotide
  modified_base 12: mod_base = OTHER; note = 2'-OMe modified nucleotide
  modified_base 13: mod_base = OTHER; note = 2'-OMe modified nucleotide
  modified_base 15: mod_base = OTHER; note = 2'-OMe modified nucleotide
  modified_base 17: mod_base = OTHER; note = 2'-OMe modified nucleotide
  modified_base 19: mod_base = OTHER; note = 2'-OMe modified nucleotide
  modified_base 21: mod_base = OTHER; note = 2'-OMe modified nucleotide
  modified_base 22: mod_base = OTHER; note = 2'-OMe modified nucleotide
  modified_base 23: mod_base = OTHER; note = 2'-OMe modified nucleotide
  modified_base 24: mod_base = OTHER; note = 2'-OMe modified nucleotide
  modified_base 26: mod_base = OTHER; note = 2'-OMe modified nucleotide
  modified_base 2: mod_base = OTHER; note = 2-deoxy-2-fluoro ribonucleotide
  modified_base 4: mod_base = OTHER; note = 2-deoxy-2-fluoro ribonucleotide
  modified_base 6: mod_base = OTHER; note = 2-deoxy-2-fluoro ribonucleotide
  modified_base 8: mod_base = OTHER; note = 2-deoxy-2-fluoro ribonucleotide
  modified_base 10: mod_base = OTHER; note = 2-deoxy-2-fluoro ribonucleotide
  modified_base 14: mod_base = OTHER; note = 2-deoxy-2-fluoro ribonucleotide
  modified_base 16: mod_base = OTHER; note = 2-deoxy-2-fluoro ribonucleotide
  modified_base 18: mod_base = OTHER; note = 2-deoxy-2-fluoro ribonucleotide
  modified_base 20: mod_base = OTHER; note = 2-deoxy-2-fluoro ribonucleotide
  modified_base 1..2: mod_base = OTHER; note = phosphorothioate internucleotide linkage
  modified_base 2..3: mod_base = OTHER; note = phosphorothioate internucleotide linkage
  modified_base 22..23: mod_base = OTHER; note = phosphorothioate internucleotide linkage
  modified_base 23..24: mod_base = OTHER; note = phosphorothioate internucleotide linkage
tgagaatgagcctcgataactcttat

SEQ ID NO: 580 - RNA, 26 nt, synthetic construct
  source 1..26: mol_type = other RNA
  modified_base 1: mod_base = OTHER; note = 2'-OMe modified nucleotide
  modified_base 3: mod_base = OTHER; note = 2'-OMe modified nucleotide
  modified_base 5: mod_base = OTHER; note = 2'-OMe modified nucleotide
  modified_base 7: mod_base = OTHER; note = 2'-OMe modified nucleotide
  modified_base 9: mod_base = OTHER; note = 2'-OMe modified nucleotide
  modified_base 11: mod_base = OTHER; note = 2'-OMe modified nucleotide
  modified_base 12: mod_base = OTHER; note = 2'-OMe modified nucleotide
  modified_base 13: mod_base = OTHER; note = 2'-OMe modified nucleotide
  modified_base 15: mod_base = OTHER; note = 2'-OMe modified nucleotide
  modified_base 17: mod_base = OTHER; note = 2'-OMe modified nucleotide
  modified_base 19: mod_base = OTHER; note = 2'-OMe modified nucleotide
  modified_base 21: mod_base = OTHER; note = 2'-OMe modified nucleotide
  modified_base 23: mod_base = OTHER; note = 2'-OMe modified nucleotide
  modified_base 24: mod_base = OTHER; note = 2'-OMe modified nucleotide
  modified_base 26: mod_base = OTHER; note = 2'-OMe modified nucleotide
  modified_base 2: mod_base = OTHER; note = 2-deoxy-2-fluoro ribonucleotide
  modified_base 4: mod_base = OTHER; note = 2-deoxy-2-fluoro ribonucleotide
  modified_base 6: mod_base = OTHER; note = 2-deoxy-2-fluoro ribonucleotide
  modified_base 8: mod_base = OTHER; note = 2-deoxy-2-fluoro ribonucleotide
  modified_base 10: mod_base = OTHER; note = 2-deoxy-2-fluoro ribonucleotide
  modified_base 14: mod_base = OTHER; note = 2-deoxy-2-fluoro ribonucleotide
  modified_base 16: mod_base = OTHER; note = 2-deoxy-2-fluoro ribonucleotide
  modified_base 18: mod_base = OTHER; note = 2-deoxy-2-fluoro ribonucleotide
  modified_base 20: mod_base = OTHER; note = 2-deoxy-2-fluoro ribonucleotide
  modified_base 22: mod_base = OTHER; note = 2-deoxy-2-fluoro ribonucleotide
  modified_base 1..2: mod_base = OTHER; note = phosphorothioate internucleotide linkage
  modified_base 2..3: mod_base = OTHER; note = phosphorothioate internucleotide linkage
  modified_base 22..23: mod_base = OTHER; note = phosphorothioate internucleotide linkage
  modified_base 23..24: mod_base = OTHER; note = phosphorothioate internucleotide linkage
tgacacctgattctgtttctgagtat

SEQ ID NO: 581 - RNA, 26 nt, synthetic construct
  source 1..26: mol_type = other RNA
  modified_base 1: mod_base = OTHER; note = 2'-OMe modified nucleotide
  modified_base 2: mod_base = OTHER; note = 2'-OMe modified nucleotide
  modified_base 3: mod_base = OTHER; note = 2'-OMe modified nucleotide
  modified_base 5: mod_base = OTHER; note = 2'-OMe modified nucleotide
  modified_base 7: mod_base = OTHER; note = 2'-OMe modified nucleotide
  modified_base 9: mod_base = OTHER; note = 2'-OMe modified nucleotide
  modified_base 11: mod_base = OTHER; note = 2'-OMe modified nucleotide
  modified_base 12: mod_base = OTHER; note = 2'-OMe modified nucleotide
  modified_base 13: mod_base = OTHER; note = 2'-OMe modified nucleotide
  modified_base 15: mod_base = OTHER; note = 2'-OMe modified nucleotide
  modified_base 17: mod_base = OTHER; note = 2'-OMe modified nucleotide
  modified_base 19: mod_base = OTHER; note = 2'-OMe modified nucleotide
  modified_base 21: mod_base = OTHER; note = 2'-OMe modified nucleotide
  modified_base 23: mod_base = OTHER; note = 2'-OMe modified nucleotide
  modified_base 24: mod_base = OTHER; note = 2'-OMe modified nucleotide
  modified_base 26: mod_base = OTHER; note = 2'-OMe modified nucleotide
  modified_base 4: mod_base = OTHER; note = 2-deoxy-2-fluoro ribonucleotide
  modified_base 6: mod_base = OTHER; note = 2-deoxy-2-fluoro ribonucleotide
  modified_base 8: mod_base = OTHER; note = 2-deoxy-2-fluoro ribonucleotide
  modified_base 10: mod_base = OTHER; note = 2-deoxy-2-fluoro ribonucleotide
  modified_base 14: mod_base = OTHER; note = 2-deoxy-2-fluoro ribonucleotide
  modified_base 16: mod_base = OTHER; note = 2-deoxy-2-fluoro ribonucleotide
  modified_base 18: mod_base = OTHER; note = 2-deoxy-2-fluoro ribonucleotide
  modified_base 20: mod_base = OTHER; note = 2-deoxy-2-fluoro ribonucleotide
  modified_base 22: mod_base = OTHER; note = 2-deoxy-2-fluoro ribonucleotide
  modified_base 1..2: mod_base = OTHER; note = phosphorothioate internucleotide linkage
  modified_base 2..3: mod_base = OTHER; note = phosphorothioate internucleotide linkage
  modified_base 22..23: mod_base = OTHER; note = phosphorothioate internucleotide linkage
  modified_base 23..24: mod_base = OTHER; note = phosphorothioate internucleotide linkage
tgacacctgattctgtttctgagtat

SEQ ID NO: 582 - RNA, 26 nt, synthetic construct
  source 1..26: mol_type = other RNA
  modified_base 1: mod_base = OTHER; note = 2'-OMe modified nucleotide
  modified_base 2: mod_base = OTHER; note = 2'-OMe modified nucleotide
  modified_base 3: mod_base = OTHER; note = 2'-OMe modified nucleotide
  modified_base 5: mod_base = OTHER; note = 2'-OMe modified nucleotide
  modified_base 7: mod_base = OTHER; note = 2'-OMe modified nucleotide
  modified_base 9: mod_base = OTHER; note = 2'-OMe modified nucleotide
  modified_base 11: mod_base = OTHER; note = 2'-OMe modified nucleotide
  modified_base 12: mod_base = OTHER; note = 2'-OMe modified nucleotide
  modified_base 13: mod_base = OTHER; note = 2'-OMe modified nucleotide
  modified_base 15: mod_base = OTHER; note = 2'-OMe modified nucleotide
  modified_base 17: mod_base = OTHER; note = 2'-OMe modified nucleotide
  modified_base 19: mod_base = OTHER; note = 2'-OMe modified nucleotide
  modified_base 21: mod_base = OTHER; note = 2'-OMe modified nucleotide
  modified_base 22: mod_base = OTHER; note = 2'-OMe modified nucleotide
  modified_base 23: mod_base = OTHER; note = 2'-OMe modified nucleotide
  modified_base 24: mod_base = OTHER; note = 2'-OMe modified nucleotide
  modified_base 26: mod_base = OTHER; note = 2'-OMe modified nucleotide
  modified_base 4: mod_base = OTHER; note = 2-deoxy-2-fluoro ribonucleotide
  modified_base 6: mod_base = OTHER; note = 2-deoxy-2-fluoro ribonucleotide
  modified_base 8: mod_base = OTHER; note = 2-deoxy-2-fluoro ribonucleotide
  modified_base 10: mod_base = OTHER; note = 2-deoxy-2-fluoro ribonucleotide
  modified_base 14: mod_base = OTHER; note = 2-deoxy-2-fluoro ribonucleotide
  modified_base 16: mod_base = OTHER; note = 2-deoxy-2-fluoro ribonucleotide
  modified_base 18: mod_base = OTHER; note = 2-deoxy-2-fluoro ribonucleotide
  modified_base 20: mod_base = OTHER; note = 2-deoxy-2-fluoro ribonucleotide
  modified_base 1..2: mod_base = OTHER; note = phosphorothioate internucleotide linkage
  modified_base 2..3: mod_base = OTHER; note = phosphorothioate internucleotide linkage
  modified_base 22..23: mod_base = OTHER; note = phosphorothioate internucleotide linkage
  modified_base 23..24: mod_base = OTHER; note = phosphorothioate internucleotide linkage
tgacacctgattctgtttctgagtat

SEQ ID NO: 583 - RNA, 26 nt, synthetic construct
  source 1..26: mol_type = other RNA
  modified_base 1: mod_base = OTHER; note = 2'-OMe modified nucleotide
  modified_base 3: mod_base = OTHER; note = 2'-OMe modified nucleotide
  modified_base 5: mod_base = OTHER; note = 2'-OMe modified nucleotide
  modified_base 7: mod_base = OTHER; note = 2'-OMe modified nucleotide
  modified_base 9: mod_base = OTHER; note = 2'-OMe modified nucleotide
  modified_base 11: mod_base = OTHER; note = 2'-OMe modified nucleotide
  modified_base 12: mod_base = OTHER; note = 2'-OMe modified nucleotide
  modified_base 13: mod_base = OTHER; note = 2'-OMe modified nucleotide
  modified_base 15: mod_base = OTHER; note = 2'-OMe modified nucleotide
  modified_base 17: mod_base = OTHER; note = 2'-OMe modified nucleotide
  modified_base 19: mod_base = OTHER; note = 2'-OMe modified nucleotide
  modified_base 21: mod_base = OTHER; note = 2'-OMe modified nucleotide
  modified_base 22: mod_base = OTHER; note = 2'-OMe modified nucleotide
  modified_base 23: mod_base = OTHER; note = 2'-OMe modified nucleotide
  modified_base 24: mod_base = OTHER; note = 2'-OMe modified nucleotide
  modified_base 26: mod_base = OTHER; note = 2'-OMe modified nucleotide
  modified_base 2: mod_base = OTHER; note = 2-deoxy-2-fluoro ribonucleotide
  modified_base 4: mod_base = OTHER; note = 2-deoxy-2-fluoro ribonucleotide
  modified_base 6: mod_base = OTHER; note = 2-deoxy-2-fluoro ribonucleotide
  modified_base 8: mod_base = OTHER; note = 2-deoxy-2-fluoro ribonucleotide
  modified_base 10: mod_base = OTHER; note = 2-deoxy-2-fluoro ribonucleotide
  modified_base 14: mod_base = OTHER; note = 2-deoxy-2-fluoro ribonucleotide
  modified_base 16: mod_base = OTHER; note = 2-deoxy-2-fluoro ribonucleotide
  modified_base 18: mod_base = OTHER; note = 2-deoxy-2-fluoro ribonucleotide
  modified_base 20: mod_base = OTHER; note = 2-deoxy-2-fluoro ribonucleotide
  modified_base 1..2: mod_base = OTHER; note = phosphorothioate internucleotide linkage
  modified_base 2..3: mod_base = OTHER; note = phosphorothioate internucleotide linkage
  modified_base 22..23: mod_base = OTHER; note = phosphorothioate internucleotide linkage
  modified_base 23..24: mod_base = OTHER; note = phosphorothioate internucleotide linkage
tgacacctgattctgtttctgagtat

SEQ ID NO: 584 - RNA, 26 nt, synthetic construct
  source 1..26: mol_type = other RNA
  modified_base 1: mod_base = OTHER; note = 2'-OMe modified nucleotide
  modified_base 2: mod_base = OTHER; note = 2'-OMe modified nucleotide
  modified_base 3: mod_base = OTHER; note = 2'-OMe modified nucleotide
  modified_base 4: mod_base = OTHER; note = 2'-OMe modified nucleotide
  modified_base 5: mod_base = OTHER; note = 2'-OMe modified nucleotide
  modified_base 7: mod_base = OTHER; note = 2'-OMe modified nucleotide
  modified_base 8: mod_base = OTHER; note = 2'-OMe modified nucleotide
  modified_base 9: mod_base = OTHER; note = 2'-OMe modified nucleotide
  modified_base 11: mod_base = OTHER; note = 2'-OMe modified nucleotide
  modified_base 12: mod_base = OTHER; note = 2'-OMe modified nucleotide
  modified_base 13: mod_base = OTHER; note = 2'-OMe modified nucleotide
  modified_base 15: mod_base = OTHER; note = 2'-OMe modified nucleotide
  modified_base 17: mod_base = OTHER; note = 2'-OMe modified nucleotide
  modified_base 18: mod_base = OTHER; note = 2'-OMe modified nucleotide
  modified_base 19: mod_base = OTHER; note = 2'-OMe modified nucleotide
  modified_base 21: mod_base = OTHER; note = 2'-OMe modified nucleotide
  modified_base 23: mod_base = OTHER; note = 2'-OMe modified nucleotide
  modified_base 24: mod_base = OTHER; note = 2'-OMe modified nucleotide
  modified_base 26: mod_base = OTHER; note = 2'-OMe modified nucleotide
  modified_base 6: mod_base = OTHER; note = 2-deoxy-2-fluoro ribonucleotide
  modified_base 10: mod_base = OTHER; note = 2-deoxy-2-fluoro ribonucleotide
  modified_base 14: mod_base = OTHER; note = 2-deoxy-2-fluoro ribonucleotide
  modified_base 16: mod_base = OTHER; note = 2-deoxy-2-fluoro ribonucleotide
  modified_base 20: mod_base = OTHER; note = 2-deoxy-2-fluoro ribonucleotide
  modified_base 22: mod_base = OTHER; note = 2-deoxy-2-fluoro ribonucleotide
  modified_base 1..2: mod_base = OTHER; note = phosphorothioate internucleotide linkage
  modified_base 2..3: mod_base = OTHER; note = phosphorothioate internucleotide linkage
  modified_base 22..23: mod_base = OTHER; note = phosphorothioate internucleotide linkage
  modified_base 23..24: mod_base = OTHER; note = phosphorothioate internucleotide linkage
tgagaatgagcctcgataactcttat

SEQ ID NO: 585 - RNA, 26 nt, synthetic construct
  source 1..26: mol_type = other RNA
  modified_base 1: mod_base = OTHER; note = 2'-OMe modified nucleotide
  modified_base 2: mod_base = OTHER; note = 2'-OMe modified nucleotide
  modified_base 3: mod_base = OTHER; note = 2'-OMe modified nucleotide
  modified_base 4: mod_base = OTHER; note = 2'-OMe modified nucleotide
  modified_base 5: mod_base = OTHER; note = 2'-OMe modified nucleotide
  modified_base 6: mod_base = OTHER; note = 2'-OMe modified nucleotide
  modified_base 7: mod_base = OTHER; note = 2'-OMe modified nucleotide
  modified_base 9: mod_base = OTHER; note = 2'-OMe modified nucleotide
  modified_base 10: mod_base = OTHER; note = 2'-OMe modified nucleotide
  modified_base 11: mod_base = OTHER; note = 2'-OMe modified nucleotide
  modified_base 12: mod_base = OTHER; note = 2'-OMe modified nucleotide
  modified_base 13: mod_base = OTHER; note = 2'-OMe modified nucleotide
  modified_base 15: mod_base = OTHER; note = 2'-OMe modified nucleotide
  modified_base 16: mod_base = OTHER; note = 2'-OMe modified nucleotide
  modified_base 17: mod_base = OTHER; note = 2'-OMe modified nucleotide
  modified_base 19: mod_base = OTHER; note = 2'-OMe modified nucleotide
  modified_base 21: mod_base = OTHER; note = 2'-OMe modified nucleotide
  modified_base 23: mod_base = OTHER; note = 2'-OMe modified nucleotide
  modified_base 24: mod_base = OTHER; note = 2'-OMe modified nucleotide
  modified_base 26: mod_base = OTHER; note = 2'-OMe modified nucleotide
  modified_base 8: mod_base = OTHER; note = 2-deoxy-2-fluoro ribonucleotide
  modified_base 14: mod_base = OTHER; note = 2-deoxy-2-fluoro ribonucleotide
  modified_base 18: mod_base = OTHER; note = 2-deoxy-2-fluoro ribonucleotide
  modified_base 20: mod_base = OTHER; note = 2-deoxy-2-fluoro ribonucleotide
  modified_base 22: mod_base = OTHER; note = 2-deoxy-2-fluoro ribonucleotide
  modified_base 1..2: mod_base = OTHER; note = phosphorothioate internucleotide linkage
  modified_base 2..3: mod_base = OTHER; note = phosphorothioate internucleotide linkage
  modified_base 22..23: mod_base = OTHER; note = phosphorothioate internucleotide linkage
  modified_base 23..24: mod_base = OTHER; note = phosphorothioate internucleotide linkage
tgagaatgagcctcgataactcttat

SEQ ID NO: 586 - RNA, 26 nt, synthetic construct
  source 1..26: mol_type = other RNA
  modified_base 1: mod_base = OTHER; note = 2'-OMe modified nucleotide
  modified_base 2: mod_base = OTHER; note = 2'-OMe modified nucleotide
  modified_base 3: mod_base = OTHER; note = 2'-OMe modified nucleotide
  modified_base 4: mod_base = OTHER; note = 2'-OMe modified nucleotide
  modified_base 5: mod_base = OTHER; note = 2'-OMe modified nucleotide
  modified_base 6: mod_base = OTHER; note = 2'-OMe modified nucleotide
  modified_base 7: mod_base = OTHER; note = 2'-OMe modified nucleotide
  modified_base 9: mod_base = OTHER; note = 2'-OMe modified nucleotide
  modified_base 10: mod_base = OTHER; note = 2'-OMe modified nucleotide
  modified_base 11: mod_base = OTHER; note = 2'-OMe modified nucleotide
  modified_base 12: mod_base = OTHER; note = 2'-OMe modified nucleotide
  modified_base 13: mod_base = OTHER; note = 2'-OMe modified nucleotide
  modified_base 15: mod_base = OTHER; note = 2'-OMe modified nucleotide
  modified_base 16: mod_base = OTHER; note = 2'-OMe modified nucleotide
  modified_base 17: mod_base = OTHER; note = 2'-OMe modified nucleotide
  modified_base 19: mod_base = OTHER; note = 2'-OMe modified nucleotide
  modified_base 20: mod_base = OTHER; note = 2'-OMe modified nucleotide
  modified_base 21: mod_base = OTHER; note = 2'-OMe modified nucleotide
  modified_base 22: mod_base = OTHER; note = 2'-OMe modified nucleotide
  modified_base 23: mod_base = OTHER; note = 2'-OMe modified nucleotide
  modified_base 24: mod_base = OTHER; note = 2'-OMe modified nucleotide
  modified_base 26: mod_base = OTHER; note = 2'-OMe modified nucleotide
  modified_base 8: mod_base = OTHER; note = 2-deoxy-2-fluoro ribonucleotide
  modified_base 14: mod_base = OTHER; note = 2-deoxy-2-fluoro ribonucleotide
  modified_base 18: mod_base = OTHER; note = 2-deoxy-2-fluoro ribonucleotide
  modified_base 1..2: mod_base = OTHER; note = phosphorothioate internucleotide linkage
  modified_base 2..3: mod_base = OTHER; note = phosphorothioate internucleotide linkage
  modified_base 22..23: mod_base = OTHER; note = phosphorothioate internucleotide linkage
  modified_base 23..24: mod_base = OTHER; note = phosphorothioate internucleotide linkage
tgagaatgagcctcgataactcttat

SEQ ID NO: 587 - RNA, 26 nt, synthetic construct
  source 1..26: mol_type = other RNA
  modified_base 1: mod_base = OTHER; note = 2'-OMe modified nucleotide
  modified_base 2: mod_base = OTHER; note = 2'-OMe modified nucleotide
  modified_base 3: mod_base = OTHER; note = 2'-OMe modified nucleotide
  modified_base 5: mod_base = OTHER; note = 2'-OMe modified nucleotide
  modified_base 7: mod_base = OTHER; note = 2'-OMe modified nucleotide
  modified_base 9: mod_base = OTHER; note = 2'-OMe modified nucleotide
  modified_base 11: mod_base = OTHER; note = 2'-OMe modified nucleotide
  modified_base 12: mod_base = OTHER; note = 2'-OMe modified nucleotide
  modified_base 13: mod_base = OTHER; note = 2'-OMe modified nucleotide
  modified_base 15: mod_base = OTHER; note = 2'-OMe modified nucleotide
  modified_base 17: mod_base = OTHER; note = 2'-OMe modified nucleotide
  modified_base 18: mod_base = OTHER; note = 2'-OMe modified nucleotide
  modified_base 19: mod_base = OTHER; note = 2'-OMe modified nucleotide
  modified_base 21: mod_base = OTHER; note = 2'-OMe modified nucleotide
  modified_base 22: mod_base = OTHER; note = 2'-OMe modified nucleotide
  modified_base 23: mod_base = OTHER; note = 2'-OMe modified nucleotide
  modified_base 24: mod_base = OTHER; note = 2'-OMe modified nucleotide
  modified_base 26: mod_base = OTHER; note = 2'-OMe modified nucleotide
  modified_base 4: mod_base = OTHER; note = 2-deoxy-2-fluoro ribonucleotide
  modified_base 6: mod_base = OTHER; note = 2-deoxy-2-fluoro ribonucleotide
  modified_base 8: mod_base = OTHER; note = 2-deoxy-2-fluoro ribonucleotide
  modified_base 10: mod_base = OTHER; note = 2-deoxy-2-fluoro ribonucleotide
  modified_base 14: mod_base = OTHER; note = 2-deoxy-2-fluoro ribonucleotide
  modified_base 16: mod_base = OTHER; note = 2-deoxy-2-fluoro ribonucleotide
  modified_base 20: mod_base = OTHER; note = 2-deoxy-2-fluoro ribonucleotide
  modified_base 1..2: mod_base = OTHER; note = phosphorothioate internucleotide linkage
  modified_base 2..3: mod_base = OTHER; note = phosphorothioate internucleotide linkage
  modified_base 22..23: mod_base = OTHER; note = phosphorothioate internucleotide linkage
  modified_base 23..24: mod_base = OTHER; note = phosphorothioate internucleotide linkage
tgacacctgattctgtttctgagtat

SEQ ID NO: 588 - RNA, 26 nt, synthetic construct
  source 1..26: mol_type = other RNA
  modified_base 1: mod_base = OTHER; note = 2'-OMe modified nucleotide
  modified_base 2: mod_base = OTHER; note = 2'-OMe modified nucleotide
  modified_base 3: mod_base = OTHER; note = 2'-OMe modified nucleotide
  modified_base 5: mod_base = OTHER; note = 2'-OMe modified nucleotide
  modified_base 7: mod_base = OTHER; note = 2'-OMe modified nucleotide
  modified_base 9: mod_base = OTHER; note = 2'-OMe modified nucleotide
  modified_base 11: mod_base = OTHER; note = 2'-OMe modified nucleotide
  modified_base 12: mod_base = OTHER; note = 2'-OMe modified nucleotide
  modified_base 13: mod_base = OTHER; note = 2'-OMe modified nucleotide
  modified_base 15: mod_base = OTHER; note = 2'-OMe modified nucleotide
  modified_base 16: mod_base = OTHER; note = 2'-OMe modified nucleotide
  modified_base 17: mod_base = OTHER; note = 2'-OMe modified nucleotide
  modified_base 19: mod_base = OTHER; note = 2'-OMe modified nucleotide
  modified_base 20: mod_base = OTHER; note = 2'-OMe modified nucleotide
  modified_base 21: mod_base = OTHER; note = 2'-OMe modified nucleotide
  modified_base 22: mod_base = OTHER; note = 2'-OMe modified nucleotide
  modified_base 23: mod_base = OTHER; note = 2'-OMe modified nucleotide
  modified_base 24: mod_base = OTHER; note = 2'-OMe modified nucleotide
  modified_base 26: mod_base = OTHER; note = 2'-OMe modified nucleotide
  modified_base 4: mod_base = OTHER; note = 2-deoxy-2-fluoro ribonucleotide
  modified_base 6: mod_base = OTHER; note = 2-deoxy-2-fluoro ribonucleotide
  modified_base 8: mod_base = OTHER; note = 2-deoxy-2-fluoro ribonucleotide
  modified_base 10: mod_base = OTHER; note = 2-deoxy-2-fluoro ribonucleotide
  modified_base 14: mod_base = OTHER; note = 2-deoxy-2-fluoro ribonucleotide
  modified_base 18: mod_base = OTHER; note = 2-deoxy-2-fluoro ribonucleotide
  modified_base 1..2: mod_base = OTHER; note = phosphorothioate internucleotide linkage
  modified_base 2..3: mod_base = OTHER; note = phosphorothioate internucleotide linkage
  modified_base 22..23: mod_base = OTHER; note = phosphorothioate internucleotide linkage
  modified_base 23..24: mod_base = OTHER; note = phosphorothioate internucleotide linkage
tgacacctgattctgtttctgagtat

SEQ ID NO: 589 - RNA, 26 nt, synthetic construct
  source 1..26: mol_type = other RNA
  modified_base 1: mod_base = OTHER; note = 2'-OMe modified nucleotide
  modified_base 2: mod_base = OTHER; note = 2'-OMe modified nucleotide
  modified_base 3: mod_base = OTHER; note = 2'-OMe modified nucleotide
  modified_base 4: mod_base = OTHER; note = 2'-OMe modified nucleotide
  modified_base 5: mod_base = OTHER; note = 2'-OMe modified nucleotide
  modified_base 6: mod_base = OTHER; note = 2'-OMe modified nucleotide
  modified_base 7: mod_base = OTHER; note = 2'-OMe modified nucleotide
  modified_base 8: mod_base = OTHER; note = 2'-OMe modified nucleotide
  modified_base 9: mod_base = OTHER; note = 2'-OMe modified nucleotide
  modified_base 11: mod_base = OTHER; note = 2'-OMe modified nucleotide
  modified_base 12: mod_base = OTHER; note = 2'-OMe modified nucleotide
  modified_base 13: mod_base = OTHER; note = 2'-OMe modified nucleotide
  modified_base 15: mod_base = OTHER; note = 2'-OMe modified nucleotide
  modified_base 17: mod_base = OTHER; note = 2'-OMe modified nucleotide
  modified_base 18: mod_base = OTHER; note = 2'-OMe modified nucleotide
  modified_base 19: mod_base = OTHER; note = 2'-OMe modified nucleotide
  modified_base 21: mod_base = OTHER; note = 2'-OMe modified nucleotide
  modified_base 22: mod_base = OTHER; note = 2'-OMe modified nucleotide
  modified_base 23: mod_base = OTHER; note = 2'-OMe modified nucleotide
  modified_base 24: mod_base = OTHER; note = 2'-OMe modified nucleotide
  modified_base 26: mod_base = OTHER; note = 2'-OMe modified nucleotide
  modified_base 10: mod_base = OTHER; note = 2-deoxy-2-fluoro ribonucleotide
  modified_base 14: mod_base = OTHER; note = 2-deoxy-2-fluoro ribonucleotide
  modified_base 16: mod_base = OTHER; note = 2-deoxy-2-fluoro ribonucleotide
  modified_base 20: mod_base = OTHER; note = 2-deoxy-2-fluoro ribonucleotide
  modified_base 1..2: mod_base = OTHER; note = phosphorothioate internucleotide linkage
  modified_base 2..3: mod_base = OTHER; note = phosphorothioate internucleotide linkage
  modified_base 22..23: mod_base = OTHER; note = phosphorothioate internucleotide linkage
  modified_base 23..24: mod_base = OTHER; note = phosphorothioate internucleotide linkage
tgacacctgattctgtttctgagtat

SEQ ID NO: 590 - RNA, 26 nt, synthetic construct
  source 1..26: mol_type = other RNA
  modified_base 1: mod_base = OTHER; note = 2'-OMe modified nucleotide
  modified_base 4: mod_base = OTHER; note = 2'-OMe modified nucleotide
  modified_base 6: mod_base = OTHER; note = 2'-OMe modified nucleotide
  modified_base 9: mod_base = OTHER; note = 2'-OMe modified nucleotide
  modified_base 11: mod_base = OTHER; note = 2'-OMe modified nucleotide
  modified_base 12: mod_base = OTHER; note = 2'-OMe modified nucleotide
  modified_base 13: mod_base = OTHER; note = 2'-OMe modified nucleotide
  modified_base 15: mod_base = OTHER; note = 2'-OMe modified nucleotide
  modified_base 17: mod_base = OTHER; note = 2'-OMe modified nucleotide
  modified_base 19: mod_base = OTHER; note = 2'-OMe modified nucleotide
  modified_base 21: mod_base = OTHER; note = 2'-OMe modified nucleotide
  modified_base 23: mod_base = OTHER; note = 2'-OMe modified nucleotide
  modified_base 24: mod_base = OTHER; note = 2'-OMe modified nucleotide
  modified_base 26: mod_base = OTHER; note = 2'-OMe modified nucleotide
  modified_base 2..3: mod_base = OTHER; note = 2-deoxy-2-fluoro ribonucleotide
  modified_base 5: mod_base = OTHER; note = 2-deoxy-2-fluoro ribonucleotide
  modified_base 7..8: mod_base = OTHER; note = 2-deoxy-2-fluoro ribonucleotide
  modified_base 10: mod_base = OTHER; note = 2-deoxy-2-fluoro ribonucleotide
  modified_base 14: mod_base = OTHER; note = 2-deoxy-2-fluoro ribonucleotide
  modified_base 16: mod_base = OTHER; note = 2-deoxy-2-fluoro ribonucleotide
  modified_base 18: mod_base = OTHER; note = 2-deoxy-2-fluoro ribonucleotide
  modified_base 20: mod_base = OTHER; note = 2-deoxy-2-fluoro ribonucleotide
  modified_base 22: mod_base = OTHER; note = 2-deoxy-2-fluoro ribonucleotide
  modified_base 1..2: mod_base = OTHER; note = phosphorothioate internucleotide linkage
  modified_base 2..3: mod_base = OTHER; note = phosphorothioate internucleotide linkage
  modified_base 22..23: mod_base = OTHER; note = phosphorothioate internucleotide linkage
  modified_base 23..24: mod_base = OTHER; note = phosphorothioate internucleotide linkage
tgacacctgattctgtttctgagtat

SEQ ID NO: 591 - RNA, 26 nt, synthetic construct
  source 1..26: mol_type = other RNA
  modified_base 1: mod_base = OTHER; note = 2'-OMe modified nucleotide
  modified_base 4: mod_base = OTHER; note = 2'-OMe modified nucleotide
  modified_base 6: mod_base = OTHER; note = 2'-OMe modified nucleotide
  modified_base 7: mod_base = OTHER; note = 2'-OMe modified nucleotide
  modified_base 9: mod_base = OTHER; note = 2'-OMe modified nucleotide
  modified_base 11: mod_base = OTHER; note = 2'-OMe modified nucleotide
  modified_base 12: mod_base = OTHER; note = 2'-OMe modified nucleotide
  modified_base 13: mod_base = OTHER; note = 2'-OMe modified nucleotide
  modified_base 15: mod_base = OTHER; note = 2'-OMe modified nucleotide
  modified_base 17: mod_base = OTHER; note = 2'-OMe modified nucleotide
  modified_base 19: mod_base = OTHER; note = 2'-OMe modified nucleotide
  modified_base 21: mod_base = OTHER; note = 2'-OMe modified nucleotide
  modified_base 23: mod_base = OTHER; note = 2'-OMe modified nucleotide
  modified_base 24: mod_base = OTHER; note = 2'-OMe modified nucleotide
  modified_base 26: mod_base = OTHER; note = 2'-OMe modified nucleotide
  modified_base 2..3: mod_base = OTHER; note = 2-deoxy-2-fluoro ribonucleotide
  modified_base 5: mod_base = OTHER; note = 2-deoxy-2-fluoro ribonucleotide
  modified_base 8: mod_base = OTHER; note = 2-deoxy-2-fluoro ribonucleotide
  modified_base 10: mod_base = OTHER; note = 2-deoxy-2-fluoro ribonucleotide
  modified_base 14: mod_base = OTHER; note = 2-deoxy-2-fluoro ribonucleotide
  modified_base 16: mod_base = OTHER; note = 2-deoxy-2-fluoro ribonucleotide
  modified_base 18: mod_base = OTHER; note = 2-deoxy-2-fluoro ribonucleotide
  modified_base 20: mod_base = OTHER; note = 2-deoxy-2-fluoro ribonucleotide
  modified_base 22: mod_base = OTHER; note = 2-deoxy-2-fluoro ribonucleotide
  modified_base 1..2: mod_base = OTHER; note = phosphorothioate internucleotide linkage
  modified_base 2..3: mod_base = OTHER; note = phosphorothioate internucleotide linkage
  modified_base 22..23: mod_base = OTHER; note = phosphorothioate internucleotide linkage
  modified_base 23..24: mod_base = OTHER; note = phosphorothioate internucleotide linkage
tgacacctgattctgtttctgagtat

SEQ ID NO: 592 - RNA, 26 nt, synthetic construct
  source 1..26: mol_type = other RNA
  modified_base 1: mod_base = OTHER; note = 2'-OMe modified nucleotide
  modified_base 3: mod_base = OTHER; note = 2'-OMe modified nucleotide
  modified_base 5: mod_base = OTHER; note = 2'-OMe modified nucleotide
  modified_base 9: mod_base = OTHER; note = 2'-OMe modified nucleotide
  modified_base 11: mod_base = OTHER; note = 2'-OMe modified nucleotide
  modified_base 12: mod_base = OTHER; note = 2'-OMe modified nucleotide
  modified_base 13: mod_base = OTHER; note = 2'-OMe modified nucleotide
  modified_base 15: mod_base = OTHER; note = 2'-OMe modified nucleotide
  modified_base 17: mod_base = OTHER; note = 2'-OMe modified nucleotide
  modified_base 19: mod_base = OTHER; note = 2'-OMe modified nucleotide
  modified_base 21: mod_base = OTHER; note = 2'-OMe modified nucleotide
  modified_base 23: mod_base = OTHER; note = 2'-OMe modified nucleotide
  modified_base 24: mod_base = OTHER; note = 2'-OMe modified nucleotide
  modified_base 26: mod_base = OTHER; note = 2'-OMe modified nucleotide
  modified_base 2: mod_base = OTHER; note = 2-deoxy-2-fluoro ribonucleotide
  modified_base 4: mod_base = OTHER; note = 2-deoxy-2-fluoro ribonucleotide
  modified_base 6..8: mod_base = OTHER; note = 2-deoxy-2-fluoro ribonucleotide
  modified_base 10: mod_base = OTHER; note = 2-deoxy-2-fluoro ribonucleotide
  modified_base 14: mod_base = OTHER; note = 2-deoxy-2-fluoro ribonucleotide
  modified_base 16: mod_base = OTHER; note = 2-deoxy-2-fluoro ribonucleotide
  modified_base 18: mod_base = OTHER; note = 2-deoxy-2-fluoro ribonucleotide
  modified_base 20: mod_base = OTHER; note = 2-deoxy-2-fluoro ribonucleotide
  modified_base 22: mod_base = OTHER; note = 2-deoxy-2-fluoro ribonucleotide
  modified_base 1..2: mod_base = OTHER; note = phosphorothioate internucleotide linkage
  modified_base 2..3: mod_base = OTHER; note = phosphorothioate internucleotide linkage
  modified_base 22..23: mod_base = OTHER; note = phosphorothioate internucleotide linkage
  modified_base 23..24: mod_base = OTHER; note = phosphorothioate internucleotide linkage
tgacacctgattctgtttctgagtat

SEQ ID NO: 593 - RNA, 26 nt, synthetic construct
  source 1..26: mol_type = other RNA
  modified_base 1: mod_base = OTHER; note = 2'-deoxy nucleotide
  modified_base 3: mod_base = OTHER; note = 2'-OMe modified nucleotide
  modified_base 5: mod_base = OTHER; note = 2'-OMe modified nucleotide
  modified_base 7: mod_base = OTHER; note = 2'-OMe modified nucleotide
  modified_base 8: mod_base = OTHER; note = 2'-OMe modified nucleotide
  modified_base 9: mod_base = OTHER; note = 2'-OMe modified nucleotide
  modified_base 10: mod_base = OTHER; note = 2'-OMe modified nucleotide
  modified_base 11: mod_base = OTHER; note = 2'-OMe modified nucleotide
  modified_base 12: mod_base = OTHER; note = 2'-OMe modified nucleotide
  modified_base 13: mod_base = OTHER; note = 2'-OMe modified nucleotide
  modified_base 15: mod_base = OTHER; note = 2'-OMe modified nucleotide
  modified_base 17: mod_base = OTHER; note = 2'-OMe modified nucleotide
  modified_base 19: mod_base = OTHER; note = 2'-OMe modified nucleotide
  modified_base 21: mod_base = OTHER; note = 2'-OMe modified nucleotide
  modified_base 23: mod_base = OTHER; note = 2'-OMe modified nucleotide
  modified_base 24: mod_base = OTHER; note = 2'-OMe modified nucleotide
  modified_base 26: mod_base = OTHER; note = 2'-OMe modified nucleotide
  modified_base 2: mod_base = OTHER; note = 2-deoxy-2-fluoro ribonucleotide
  modified_base 4: mod_base = OTHER; note = 2-deoxy-2-fluoro ribonucleotide
  modified_base 6: mod_base = OTHER; note = 2-deoxy-2-fluoro ribonucleotide
  modified_base 14: mod_base = OTHER; note = 2-deoxy-2-fluoro ribonucleotide
  modified_base 16: mod_base = OTHER; note = 2-deoxy-2-fluoro ribonucleotide
  modified_base 18: mod_base = OTHER; note = 2-deoxy-2-fluoro ribonucleotide
  modified_base 20: mod_base = OTHER; note = 2-deoxy-2-fluoro ribonucleotide
  modified_base 22: mod_base = OTHER; note = 2-deoxy-2-fluoro ribonucleotide
  modified_base 1..2: mod_base = OTHER; note = phosphorothioate internucleotide linkage
  modified_base 2..3: mod_base = OTHER; note = phosphorothioate internucleotide linkage
  modified_base 22..23: mod_base = OTHER; note = phosphorothioate internucleotide linkage
  modified_base 23..24: mod_base = OTHER; note = phosphorothioate internucleotide linkage
  modified_base 1: mod_base = OTHER; note = Thymine
tgacacctgattctgtttctgagtat

SEQ ID NO: 594 - RNA, 26 nt, synthetic construct
  source 1..26: mol_type = other RNA
  modified_base 1: mod_base = OTHER; note = 2'-OMe modified nucleotide
  modified_base 3: mod_base = OTHER; note = 2'-OMe modified nucleotide
  modified_base 5: mod_base = OTHER; note = 2'-OMe modified nucleotide
  modified_base 7: mod_base = OTHER; note = 2'-OMe modified nucleotide
  modified_base 8: mod_base = OTHER; note = 2'-OMe modified nucleotide
  modified_base 9: mod_base = OTHER; note = 2'-OMe modified nucleotide
  modified_base 10: mod_base = OTHER; note = 2'-OMe modified nucleotide
  modified_base 11: mod_base = OTHER; note = 2'-OMe modified nucleotide
  modified_base 12: mod_base = OTHER; note = 2'-OMe modified nucleotide
  modified_base 13: mod_base = OTHER; note = 2'-OMe modified nucleotide
  modified_base 15: mod_base = OTHER; note = 2'-OMe modified nucleotide
  modified_base 17: mod_base = OTHER; note = 2'-OMe modified nucleotide
  modified_base 19: mod_base = OTHER; note = 2'-OMe modified nucleotide
  modified_base 21: mod_base = OTHER; note = 2'-OMe modified nucleotide
  modified_base 23: mod_base = OTHER; note = 2'-OMe modified nucleotide
  modified_base 24: mod_base = OTHER; note = 2'-OMe modified nucleotide
  modified_base 26: mod_base = OTHER; note = 2'-OMe modified nucleotide
  modified_base 2: mod_base = OTHER; note = 2-deoxy-2-fluoro ribonucleotide
  modified_base 4: mod_base = OTHER; note = 2-deoxy-2-fluoro ribonucleotide
  modified_base 6: mod_base = OTHER; note = 2-deoxy-2-fluoro ribonucleotide
  modified_base 14: mod_base = OTHER; note = 2-deoxy-2-fluoro ribonucleotide
  modified_base 16: mod_base = OTHER; note = 2-deoxy-2-fluoro ribonucleotide
  modified_base 18: mod_base = OTHER; note = 2-deoxy-2-fluoro ribonucleotide
  modified_base 20: mod_base = OTHER; note = 2-deoxy-2-fluoro ribonucleotide
  modified_base 22: mod_base = OTHER; note = 2-deoxy-2-fluoro ribonucleotide
  modified_base 1..2: mod_base = OTHER; note = phosphorothioate internucleotide linkage
  modified_base 2..3: mod_base = OTHER; note = phosphorothioate internucleotide linkage
  modified_base 22..23: mod_base = OTHER; note = phosphorothioate internucleotide linkage
  modified_base 23..24: mod_base = OTHER; note = phosphorothioate internucleotide linkage
tgacacctgattctgtttctgagtat

SEQ ID NO: 595 - RNA, 26 nt, synthetic construct
  source 1..26: mol_type = other RNA
  modified_base 1: mod_base = OTHER; note = 2'-deoxy nucleotide
  modified_base 3: mod_base = OTHER; note = 2'-OMe modified nucleotide
  modified_base 5: mod_base = OTHER; note = 2'-OMe modified nucleotide
  modified_base 7: mod_base = OTHER; note = 2'-OMe modified nucleotide
  modified_base 8: mod_base = OTHER; note = 2'-OMe modified nucleotide
  modified_base 9: mod_base = OTHER; note = 2'-OMe modified nucleotide
  modified_base 10: mod_base = OTHER; note = 2'-OMe modified nucleotide
  modified_base 11: mod_base = OTHER; note = 2'-OMe modified nucleotide
  modified_base 12: mod_base = OTHER; note = 2'-OMe modified nucleotide
  modified_base 13: mod_base = OTHER; note = 2'-OMe modified nucleotide
  modified_base 15: mod_base = OTHER; note = 2'-OMe modified nucleotide
  modified_base 17: mod_base = OTHER; note = 2'-OMe modified nucleotide
  modified_base 18: mod_base = OTHER; note = 2'-OMe modified nucleotide
  modified_base 19: mod_base = OTHER; note = 2'-OMe modified nucleotide
  modified_base 20: mod_base = OTHER; note = 2'-OMe modified nucleotide
  modified_base 21: mod_base = OTHER; note = 2'-OMe modified nucleotide
  modified_base 22: mod_base = OTHER; note = 2'-OMe modified nucleotide
  modified_base 23: mod_base = OTHER; note = 2'-OMe modified nucleotide
  modified_base 24: mod_base = OTHER; note = 2'-OMe modified nucleotide
  modified_base 26: mod_base = OTHER; note = 2'-OMe modified nucleotide
  modified_base 2: mod_base = OTHER; note = 2-deoxy-2-fluoro ribonucleotide
  modified_base 4: mod_base = OTHER; note = 2-deoxy-2-fluoro ribonucleotide
  modified_base 6: mod_base = OTHER; note = 2-deoxy-2-fluoro ribonucleotide
  modified_base 14: mod_base = OTHER; note = 2-deoxy-2-fluoro ribonucleotide
  modified_base 16: mod_base = OTHER; note = 2-deoxy-2-fluoro ribonucleotide
  modified_base 1..2: mod_base = OTHER; note = phosphorothioate internucleotide linkage
  modified_base 2..3: mod_base = OTHER; note = phosphorothioate internucleotide linkage
  modified_base 22..23: mod_base = OTHER; note = phosphorothioate internucleotide linkage
  modified_base 23..24: mod_base = OTHER; note = phosphorothioate internucleotide linkage
  modified_base 1: mod_base = OTHER; note = Thymine
tgacacctgattctgtttctgagtat

SEQ ID NO: 596 - RNA, 26 nt, synthetic construct
  source 1..26: mol_type = other RNA
  modified_base 1: mod_base = OTHER; note = 2'-OMe modified nucleotide
  modified_base 3: mod_base = OTHER; note = 2'-OMe modified nucleotide
  modified_base 5: mod_base = OTHER; note = 2'-OMe modified nucleotide
  modified_base 7: mod_base = OTHER; note = 2'-OMe modified nucleotide
  modified_base 8: mod_base = OTHER; note = 2'-OMe modified nucleotide
  modified_base 9: mod_base = OTHER; note = 2'-OMe modified nucleotide
  modified_base 10: mod_base = OTHER; note = 2'-OMe modified nucleotide
  modified_base 11: mod_base = OTHER; note = 2'-OMe modified nucleotide
  modified_base 12: mod_base = OTHER; note = 2'-OMe modified nucleotide
  modified_base 13: mod_base = OTHER; note = 2'-OMe modified nucleotide
  modified_base 15: mod_base = OTHER; note = 2'-OMe modified nucleotide
  modified_base 17: mod_base = OTHER; note = 2'-OMe modified nucleotide
  modified_base 18: mod_base = OTHER; note = 2'-OMe modified nucleotide
  modified_base 19: mod_base = OTHER; note = 2'-OMe modified nucleotide
  modified_base 20: mod_base = OTHER; note = 2'-OMe modified nucleotide
  modified_base 21: mod_base = OTHER; note = 2'-OMe modified nucleotide
  modified_base 22: mod_base = OTHER; note = 2'-OMe modified nucleotide
  modified_base 23: mod_base = OTHER; note = 2'-OMe modified nucleotide
  modified_base 24: mod_base = OTHER; note = 2'-OMe modified nucleotide
  modified_base 26: mod_base = OTHER; note = 2'-OMe modified nucleotide
  modified_base 2: mod_base = OTHER; note = 2-deoxy-2-fluoro ribonucleotide
  modified_base 4: mod_base = OTHER; note = 2-deoxy-2-fluoro ribonucleotide
  modified_base 6: mod_base = OTHER; note = 2-deoxy-2-fluoro ribonucleotide
  modified_base 14: mod_base = OTHER; note = 2-deoxy-2-fluoro ribonucleotide
  modified_base 16: mod_base = OTHER; note = 2-deoxy-2-fluoro ribonucleotide
  modified_base 1..2: mod_base = OTHER; note = phosphorothioate internucleotide linkage
  modified_base 2..3: mod_base = OTHER; note = phosphorothioate internucleotide linkage
  modified_base 22..23: mod_base = OTHER; note = phosphorothioate internucleotide linkage
  modified_base 23..24: mod_base = OTHER; note = phosphorothioate internucleotide linkage
tgacacctgattctgtttctgagtat

SEQ ID NO: 597 - RNA, 26 nt, synthetic construct
  source 1..26: mol_type = other RNA
  modified_base 1: mod_base = OTHER; note = 2'-deoxy nucleotide
  modified_base 3: mod_base = OTHER; note = 2'-OMe modified nucleotide
  modified_base 5: mod_base = OTHER; note = 2'-OMe modified nucleotide
  modified_base 7: mod_base = OTHER; note = 2'-OMe modified nucleotide
  modified_base 9: mod_base = OTHER; note = 2'-OMe modified nucleotide
  modified_base 11: mod_base = OTHER; note = 2'-OMe modified nucleotide
  modified_base 12: mod_base = OTHER; note = 2'-OMe modified nucleotide
  modified_base 13: mod_base = OTHER; note = 2'-OMe modified nucleotide
  modified_base 15: mod_base = OTHER; note = 2'-OMe modified nucleotide
  modified_base 17: mod_base = OTHER; note = 2'-OMe modified nucleotide
  modified_base 18: mod_base = OTHER; note = 2'-OMe modified nucleotide
  modified_base 19: mod_base = OTHER; note = 2'-OMe modified nucleotide
  modified_base 20: mod_base = OTHER; note = 2'-OMe modified nucleotide
  modified_base 21: mod_base = OTHER; note = 2'-OMe modified nucleotide
  modified_base 22: mod_base = OTHER; note = 2'-OMe modified nucleotide
  modified_base 23: mod_base = OTHER; note = 2'-OMe modified nucleotide
  modified_base 24: mod_base = OTHER; note = 2'-OMe modified nucleotide
  modified_base 26: mod_base = OTHER; note = 2'-OMe modified nucleotide
  modified_base 2: mod_base = OTHER; note = 2-deoxy-2-fluoro ribonucleotide
  modified_base 4: mod_base = OTHER; note = 2-deoxy-2-fluoro ribonucleotide
  modified_base 6: mod_base = OTHER; note = 2-deoxy-2-fluoro ribonucleotide
  modified_base 8: mod_base = OTHER; note = 2-deoxy-2-fluoro ribonucleotide
  modified_base 10: mod_base = OTHER; note = 2-deoxy-2-fluoro ribonucleotide
  modified_base 14: mod_base = OTHER; note = 2-deoxy-2-fluoro ribonucleotide
  modified_base 16: mod_base = OTHER; note = 2-deoxy-2-fluoro ribonucleotide
  modified_base 1..2: mod_base = OTHER; note = phosphorothioate internucleotide linkage
  modified_base 2..3: mod_base = OTHER; note = phosphorothioate internucleotide linkage
  modified_base 22..23: mod_base = OTHER; note = phosphorothioate internucleotide linkage
  modified_base 23..24: mod_base = OTHER; note = phosphorothioate internucleotide linkage
  modified_base 1: mod_base = OTHER; note = Thymine
tgacacctgattctgtttctgagtat

SEQ ID NO: 598 - RNA, 26 nt, synthetic construct
  source 1..26: mol_type = other RNA
  modified_base 1: mod_base = OTHER; note = 2'-OMe modified nucleotide
  modified_base 3: mod_base = OTHER; note = 2'-OMe modified nucleotide
  modified_base 5: mod_base = OTHER; note = 2'-OMe modified nucleotide
  modified_base 7: mod_base = OTHER; note = 2'-OMe modified nucleotide
  modified_base 9: mod_base = OTHER; note = 2'-OMe modified nucleotide
  modified_base 11: mod_base = OTHER; note = 2'-OMe modified nucleotide
  modified_base 12: mod_base = OTHER; note = 2'-OMe modified nucleotide
  modified_base 13: mod_base = OTHER; note = 2'-OMe modified nucleotide
  modified_base 15: mod_base = OTHER; note = 2'-OMe modified nucleotide
  modified_base 17: mod_base = OTHER; note = 2'-OMe modified nucleotide
  modified_base 18: mod_base = OTHER; note = 2'-OMe modified nucleotide
  modified_base 19: mod_base = OTHER; note = 2'-OMe modified nucleotide
  modified_base 20: mod_base = OTHER; note = 2'-OMe modified nucleotide
  modified_base 21: mod_base = OTHER; note = 2'-OMe modified nucleotide
  modified_base 22: mod_base = OTHER; note = 2'-OMe modified nucleotide
  modified_base 23: mod_base = OTHER; note = 2'-OMe modified nucleotide
  modified_base 24: mod_base = OTHER; note = 2'-OMe modified nucleotide
  modified_base 26: mod_base = OTHER; note = 2'-OMe modified nucleotide
  modified_base 2: mod_base = OTHER; note = 2-deoxy-2-fluoro ribonucleotide
  modified_base 4: mod_base = OTHER; note = 2-deoxy-2-fluoro ribonucleotide
  modified_base 6: mod_base = OTHER; note = 2-deoxy-2-fluoro ribonucleotide
  modified_base 8: mod_base = OTHER; note = 2-deoxy-2-fluoro ribonucleotide
  modified_base 10: mod_base = OTHER; note = 2-deoxy-2-fluoro ribonucleotide
  modified_base 14: mod_base = OTHER; note = 2-deoxy-2-fluoro ribonucleotide
  modified_base 16: mod_base = OTHER; note = 2-deoxy-2-fluoro ribonucleotide
  modified_base 1..2: mod_base = OTHER; note = phosphorothioate internucleotide linkage
  modified_base 2..3: mod_base = OTHER; note = phosphorothioate internucleotide linkage
  modified_base 22..23: mod_base = OTHER; note = phosphorothioate internucleotide linkage
  modified_base 23..24: mod_base = OTHER; note = phosphorothioate internucleotide linkage
tgacacctgattctgtttctgagtat

SEQ ID NO: 599 - RNA, 26 nt, synthetic construct
  source 1..26: mol_type = other RNA
  modified_base 1: mod_base = OTHER; note = 2'-OMe modified nucleotide
  modified_base 3: mod_base = OTHER; note = 2'-OMe modified nucleotide
  modified_base 5: mod_base = OTHER; note = 2'-OMe modified nucleotide
  modified_base 7: mod_base = OTHER; note = 2'-OMe modified nucleotide
  modified_base 9: mod_base = OTHER; note = 2'-OMe modified nucleotide
  modified_base 11: mod_base = OTHER; note = 2'-OMe modified nucleotide
  modified_base 12: mod_base = OTHER; note = 2'-OMe modified nucleotide
  modified_base 13: mod_base = OTHER; note = 2'-OMe modified nucleotide
  modified_base 15: mod_base = OTHER; note = 2'-OMe modified nucleotide
  modified_base 17: mod_base = OTHER; note = 2'-OMe modified nucleotide
  modified_base 19: mod_base = OTHER; note = 2'-OMe modified nucleotide
  modified_base 21: mod_base = OTHER; note = 2'-OMe modified nucleotide
  modified_base 23: mod_base = OTHER; note = 2'-OMe modified nucleotide
  modified_base 24: mod_base = OTHER; note = 2'-OMe modified nucleotide
  modified_base 26: mod_base = OTHER; note = 2'-OMe modified nucleotide
  modified_base 2: mod_base = OTHER; note = 2-deoxy-2-fluoro ribonucleotide
  modified_base 4: mod_base = OTHER; note = 2-deoxy-2-fluoro ribonucleotide
  modified_base 6: mod_base = OTHER; note = 2-deoxy-2-fluoro ribonucleotide
  modified_base 8: mod_base = OTHER; note = 2-deoxy-2-fluoro ribonucleotide
  modified_base 10: mod_base = OTHER; note = 2-deoxy-2-fluoro ribonucleotide
  modified_base 14: mod_base = OTHER; note = 2-deoxy-2-fluoro ribonucleotide
  modified_base 16: mod_base = OTHER; note = 2-deoxy-2-fluoro ribonucleotide
  modified_base 18: mod_base = OTHER; note = 2-deoxy-2-fluoro ribonucleotide
  modified_base 20: mod_base = OTHER; note = 2-deoxy-2-fluoro ribonucleotide
  modified_base 22: mod_base = OTHER; note = 2-deoxy-2-fluoro ribonucleotide
  modified_base 1..2: mod_base = OTHER; note = phosphorothioate internucleotide linkage
  modified_base 2..3: mod_base = OTHER; note = phosphorothioate internucleotide linkage
  modified_base 22..23: mod_base = OTHER; note = phosphorothioate internucleotide linkage
  modified_base 23..24: mod_base = OTHER; note = phosphorothioate internucleotide linkage
tcgtataacaataaggggctgcctat

SEQ ID NO: 600 - RNA, 26 nt, synthetic construct
  source 1..26: mol_type = other RNA
  modified_base 1: mod_base = OTHER; note = 2'-OMe modified nucleotide
  modified_base 3: mod_base = OTHER; note = 2'-OMe modified nucleotide
  modified_base 5: mod_base = OTHER; note = 2'-OMe modified nucleotide
  modified_base 7: mod_base = OTHER; note = 2'-OMe modified nucleotide
  modified_base 9: mod_base = OTHER; note = 2'-OMe modified nucleotide
  modified_base 11: mod_base = OTHER; note = 2'-OMe modified nucleotide
  modified_base 12: mod_base = OTHER; note = 2'-OMe modified nucleotide
  modified_base 13: mod_base = OTHER; note = 2'-OMe modified nucleotide
  modified_base 15: mod_base = OTHER; note = 2'-OMe modified nucleotide
  modified_base 17: mod_base = OTHER; note = 2'-OMe modified nucleotide
  modified_base 19: mod_base = OTHER; note = 2'-OMe modified nucleotide
  modified_base 21: mod_base = OTHER; note = 2'-OMe modified nucleotide
  modified_base 22: mod_base = OTHER; note = 2'-OMe modified nucleotide
  modified_base 23: mod_base = OTHER; note = 2'-OMe modified nucleotide
  modified_base 24: mod_base = OTHER; note = 2'-OMe modified nucleotide
  modified_base 26: mod_base = OTHER; note = 2'-OMe modified nucleotide
  modified_base 2: mod_base = OTHER; note = 2-deoxy-2-fluoro ribonucleotide
  modified_base 4: mod_base = OTHER; note = 2-deoxy-2-fluoro ribonucleotide
  modified_base 6: mod_base = OTHER; note = 2-deoxy-2-fluoro ribonucleotide
  modified_base 8: mod_base = OTHER; note = 2-deoxy-2-fluoro ribonucleotide
  modified_base 10: mod_base = OTHER; note = 2-deoxy-2-fluoro ribonucleotide
  modified_base 14: mod_base = OTHER; note = 2-deoxy-2-fluoro ribonucleotide
  modified_base 16: mod_base = OTHER; note = 2-deoxy-2-fluoro ribonucleotide
  modified_base 18: mod_base = OTHER; note = 2-deoxy-2-fluoro ribonucleotide
  modified_base 20: mod_base = OTHER; note = 2-deoxy-2-fluoro ribonucleotide
  modified_base 1..2: mod_base = OTHER; note = phosphorothioate internucleotide linkage
  modified_base 2..3: mod_base = OTHER; note = phosphorothioate internucleotide linkage
  modified_base 22..23: mod_base = OTHER; note = phosphorothioate internucleotide linkage
  modified_base 23..24: mod_base = OTHER; note = phosphorothioate internucleotide linkage
tcgtataacaataaggggctgcctat

SEQ ID NO: 601 - RNA, 26 nt, synthetic construct
  source 1..26: mol_type = other RNA
  modified_base 22: mod_base = OTHER; note = 2'-methoxyethyl nucleotide
  modified_base 23: mod_base = OTHER; note = 2'-methoxyethyl nucleotide
  modified_base 1: mod_base = OTHER; note = 2'-OMe modified nucleotide
  modified_base 3: mod_base = OTHER; note = 2'-OMe modified nucleotide
  modified_base 5: mod_base = OTHER; note = 2'-OMe modified nucleotide
  modified_base 7: mod_base = OTHER; note = 2'-OMe modified nucleotide
  modified_base 9: mod_base = OTHER; note = 2'-OMe modified nucleotide
  modified_base 11: mod_base = OTHER; note = 2'-OMe modified nucleotide
  modified_base 12: mod_base = OTHER; note = 2'-OMe modified nucleotide
  modified_base 13: mod_base = OTHER; note = 2'-OMe modified nucleotide
  modified_base 15: mod_base = OTHER; note = 2'-OMe modified nucleotide
  modified_base 17: mod_base = OTHER; note = 2'-OMe modified nucleotide
  modified_base 19: mod_base = OTHER; note = 2'-OMe modified nucleotide
  modified_base 21: mod_base = OTHER; note = 2'-OMe modified nucleotide
  modified_base 24: mod_base = OTHER; note = 2'-OMe modified nucleotide
  modified_base 26: mod_base = OTHER; note = 2'-OMe modified nucleotide
  modified_base 2: mod_base = OTHER; note = 2-deoxy-2-fluoro ribonucleotide
  modified_base 4: mod_base = OTHER; note = 2-deoxy-2-fluoro ribonucleotide
  modified_base 6: mod_base = OTHER; note = 2-deoxy-2-fluoro ribonucleotide
  modified_base 8: mod_base = OTHER; note = 2-deoxy-2-fluoro ribonucleotide
  modified_base 10: mod_base = OTHER; note = 2-deoxy-2-fluoro ribonucleotide
  modified_base 14: mod_base = OTHER; note = 2-deoxy-2-fluoro ribonucleotide
  modified_base 16: mod_base = OTHER; note = 2-deoxy-2-fluoro ribonucleotide
  modified_base 18: mod_base = OTHER; note = 2-deoxy-2-fluoro ribonucleotide
  modified_base 20: mod_base = OTHER; note = 2-deoxy-2-fluoro ribonucleotide
  modified_base 1..2: mod_base = OTHER; note = phosphorothioate internucleotide linkage
  modified_base 2..3: mod_base = OTHER; note = phosphorothioate internucleotide linkage
  modified_base 22..23: mod_base = OTHER; note = phosphorothioate internucleotide linkage
  modified_base 23..24: mod_base = OTHER; note = phosphorothioate internucleotide linkage
  modified_base 23: mod_base = OTHER; note = Thymine
tgagaatgagcctcgataactcttat

SEQ ID NO: 602 - RNA, 26 nt, synthetic construct
  source 1..26: mol_type = other RNA
  modified_base 1: mod_base = OTHER; note = 2'-OMe modified nucleotide
  modified_base 3: mod_base = OTHER; note = 2'-OMe modified nucleotide
  modified_base 5: mod_base = OTHER; note = 2'-OMe modified nucleotide
  modified_base 7: mod_base = OTHER; note = 2'-OMe modified nucleotide
  modified_base 9: mod_base = OTHER; note = 2'-OMe modified nucleotide
  modified_base 11: mod_base = OTHER; note = 2'-OMe modified nucleotide
  modified_base 12: mod_base = OTHER; note = 2'-OMe modified nucleotide
  modified_base 13: mod_base = OTHER; note = 2'-OMe modified nucleotide
  modified_base 15: mod_base = OTHER; note = 2'-OMe modified nucleotide
  modified_base 17: mod_base = OTHER; note = 2'-OMe modified nucleotide
  modified_base 19: mod_base = OTHER; note = 2'-OMe modified nucleotide
  modified_base 21: mod_base = OTHER; note = 2'-OMe modified nucleotide
  modified_base 24: mod_base = OTHER; note = 2'-OMe modified nucleotide
  modified_base 26: mod_base = OTHER; note = 2'-OMe modified nucleotide
  modified_base 22: mod_base = OTHER; note = 2'-methoxyethyl nucleotide
  modified_base 23: mod_base = OTHER; note = 2'-methoxyethyl nucleotide
  modified_base 2: mod_base = OTHER; note = 2-deoxy-2-fluoro ribonucleotide
  modified_base 4: mod_base = OTHER; note = 2-deoxy-2-fluoro ribonucleotide
  modified_base 6: mod_base = OTHER; note = 2-deoxy-2-fluoro ribonucleotide
  modified_base 8: mod_base = OTHER; note = 2-deoxy-2-fluoro ribonucleotide
  modified_base 10: mod_base = OTHER; note = 2-deoxy-2-fluoro ribonucleotide
  modified_base 14: mod_base = OTHER; note = 2-deoxy-2-fluoro ribonucleotide
  modified_base 16: mod_base = OTHER; note = 2-deoxy-2-fluoro ribonucleotide
  modified_base 18: mod_base = OTHER; note = 2-deoxy-2-fluoro ribonucleotide
  modified_base 20: mod_base = OTHER; note = 2-deoxy-2-fluoro ribonucleotide
  modified_base 1..2: mod_base = OTHER; note = phosphorothioate internucleotide linkage
  modified_base 2..3: mod_base = OTHER; note = phosphorothioate internucleotide linkage
  modified_base 23: mod_base = OTHER; note = Thymine
tgagaatgagcctcgataactcttat

SEQ ID NO: 603 - RNA, 26 nt, synthetic construct
  source 1..26: mol_type = other RNA
  modified_base 1: mod_base = OTHER; note = 2'-OMe modified nucleotide
  modified_base 3: mod_base = OTHER; note = 2'-OMe modified nucleotide
  modified_base 5: mod_base = OTHER; note = 2'-OMe modified nucleotide
  modified_base 7: mod_base = OTHER; note = 2'-OMe modified nucleotide
  modified_base 9: mod_base = OTHER; note = 2'-OMe modified nucleotide
  modified_base 11: mod_base = OTHER; note = 2'-OMe modified nucleotide
  modified_base 12: mod_base = OTHER; note = 2'-OMe modified nucleotide
  modified_base 13: mod_base = OTHER; note = 2'-OMe modified nucleotide
  modified_base 15: mod_base = OTHER; note = 2'-OMe modified nucleotide
  modified_base 17: mod_base = OTHER; note = 2'-OMe modified nucleotide
  modified_base 19: mod_base = OTHER; note = 2'-OMe modified nucleotide
  modified_base 21: mod_base = OTHER; note = 2'-OMe modified nucleotide
  modified_base 22: mod_base = OTHER; note = 2'-OMe modified nucleotide
  modified_base 23: mod_base = OTHER; note = 2'-OMe modified nucleotide
  modified_base 24: mod_base = OTHER; note = 2'-OMe modified nucleotide
  modified_base 26: mod_base = OTHER; note = 2'-OMe modified nucleotide
  modified_base 2: mod_base = OTHER; note = 2-deoxy-2-fluoro ribonucleotide
  modified_base 4: mod_base = OTHER; note = 2-deoxy-2-fluoro ribonucleotide
  modified_base 6: mod_base = OTHER; note = 2-deoxy-2-fluoro ribonucleotide
  modified_base 8: mod_base = OTHER; note = 2-deoxy-2-fluoro ribonucleotide
  modified_base 10: mod_base = OTHER; note = 2-deoxy-2-fluoro ribonucleotide
  modified_base 14: mod_base = OTHER; note = 2-deoxy-2-fluoro ribonucleotide
  modified_base 16: mod_base = OTHER; note = 2-deoxy-2-fluoro ribonucleotide
  modified_base 18: mod_base = OTHER; note = 2-deoxy-2-fluoro ribonucleotide
  modified_base 20: mod_base = OTHER; note = 2-deoxy-2-fluoro ribonucleotide
  modified_base 1..2: mod_base = OTHER; note = phosphorothioate internucleotide linkage
  modified_base 2..3: mod_base = OTHER; note = phosphorothioate internucleotide linkage
tgagaatgagcctcgataactcttat

SEQ ID NO: 604 - RNA, 26 nt, synthetic construct
  source 1..26: mol_type = other RNA
  modified_base 1: mod_base = OTHER; note = 2'-OMe modified nucleotide
  modified_base 3: mod_base = OTHER; note = 2'-OMe modified nucleotide
  modified_base 5: mod_base = OTHER; note = 2'-OMe modified nucleotide
  modified_base 7: mod_base = OTHER; note = 2'-OMe modified nucleotide
  modified_base 11: mod_base = OTHER; note = 2'-OMe modified nucleotide
  modified_base 12: mod_base = OTHER; note = 2'-OMe modified nucleotide
  modified_base 13: mod_base = OTHER; note = 2'-OMe modified nucleotide
  modified_base 15: mod_base = OTHER; note = 2'-OMe modified nucleotide
  modified_base 17: mod_base = OTHER; note = 2'-OMe modified nucleotide
  modified_base 19: mod_base = OTHER; note = 2'-OMe modified nucleotide
  modified_base 21: mod_base = OTHER; note = 2'-OMe modified nucleotide
  modified_base 23: mod_base = OTHER; note = 2'-OMe modified nucleotide
  modified_base 24: mod_base = OTHER; note = 2'-OMe modified nucleotide
  modified_base 26: mod_base = OTHER; note = 2'-OMe modified nucleotide
  modified_base 2: mod_base = OTHER; note = 2-deoxy-2-fluoro ribonucleotide
  modified_base 4: mod_base = OTHER; note = 2-deoxy-2-fluoro ribonucleotide
  modified_base 6: mod_base = OTHER; note = 2-deoxy-2-fluoro ribonucleotide
  modified_base 8..10: mod_base = OTHER; note = 2-deoxy-2-fluoro ribonucleotide
  modified_base 14: mod_base = OTHER; note = 2-deoxy-2-fluoro ribonucleotide
  modified_base 16: mod_base = OTHER; note = 2-deoxy-2-fluoro ribonucleotide
  modified_base 18: mod_base = OTHER; note = 2-deoxy-2-fluoro ribonucleotide
  modified_base 20: mod_base = OTHER; note = 2-deoxy-2-fluoro ribonucleotide
  modified_base 22: mod_base = OTHER; note = 2-deoxy-2-fluoro ribonucleotide
  modified_base 1..2: mod_base = OTHER; note = phosphorothioate internucleotide linkage
  modified_base 2..3: mod_base = OTHER; note = phosphorothioate internucleotide linkage
  modified_base 22..23: mod_base = OTHER; note = phosphorothioate internucleotide linkage
  modified_base 23..24: mod_base = OTHER; note = phosphorothioate internucleotide linkage
tcgtataacaataaggggctgcctat

SEQ ID NO: 605 - RNA, 26 nt, synthetic construct
  source 1..26: mol_type = other RNA
  modified_base 1: mod_base = OTHER; note = 2'-OMe modified nucleotide
  modified_base 3: mod_base = OTHER; note = 2'-OMe modified nucleotide
  modified_base 5: mod_base = OTHER; note = 2'-OMe modified nucleotide
  modified_base 7: mod_base = OTHER; note = 2'-OMe modified nucleotide
  modified_base 11: mod_base = OTHER; note = 2'-OMe modified nucleotide
  modified_base 12: mod_base = OTHER; note = 2'-OMe modified nucleotide
  modified_base 13: mod_base = OTHER; note = 2'-OMe modified nucleotide
  modified_base 15: mod_base = OTHER; note = 2'-OMe modified nucleotide
  modified_base 17: mod_base = OTHER; note = 2'-OMe modified nucleotide
  modified_base 19: mod_base = OTHER; note = 2'-OMe modified nucleotide
  modified_base 21..24: mod_base = OTHER; note = 2'-OMe modified nucleotide
  modified_base 26: mod_base = OTHER; note = 2'-OMe modified nucleotide
  modified_base 2: mod_base = OTHER; note = 2-deoxy-2-fluoro ribonucleotide
  modified_base 4: mod_base = OTHER; note = 2-deoxy-2-fluoro ribonucleotide
  modified_base 6: mod_base = OTHER; note = 2-deoxy-2-fluoro ribonucleotide
  modified_base 8..10: mod_base = OTHER; note = 2-deoxy-2-fluoro ribonucleotide
  modified_base 14: mod_base = OTHER; note = 2-deoxy-2-fluoro ribonucleotide
  modified_base 16: mod_base = OTHER; note = 2-deoxy-2-fluoro ribonucleotide
  modified_base 18: mod_base = OTHER; note = 2-deoxy-2-fluoro ribonucleotide
  modified_base 20: mod_base = OTHER; note = 2-deoxy-2-fluoro ribonucleotide
  modified_base 1..2: mod_base = OTHER; note = phosphorothioate internucleotide linkage
  modified_base 2..3: mod_base = OTHER; note = phosphorothioate internucleotide linkage
  modified_base 22..23: mod_base = OTHER; note = phosphorothioate internucleotide linkage
  modified_base 23..24: mod_base = OTHER; note = phosphorothioate internucleotide linkage
tcgtataacaataaggggctgcctat

SEQ ID NO: 606 - RNA, 26 nt, synthetic construct
  source 1..26: mol_type = other RNA
  modified_base 1: mod_base = OTHER; note = 2'-OMe modified nucleotide
  modified_base 3: mod_base = OTHER; note = 2'-OMe modified nucleotide
  modified_base 5: mod_base = OTHER; note = 2'-OMe modified nucleotide
  modified_base 7: mod_base = OTHER; note = 2'-OMe modified nucleotide
  modified_base 9: mod_base = OTHER; note = 2'-OMe modified nucleotide
  modified_base 12: mod_base = OTHER; note = 2'-OMe modified nucleotide
  modified_base 13: mod_base = OTHER; note = 2'-OMe modified nucleotide
  modified_base 15: mod_base = OTHER; note = 2'-OMe modified nucleotide
  modified_base 17: mod_base = OTHER; note = 2'-OMe modified nucleotide
  modified_base 19: mod_base = OTHER; note = 2'-OMe modified nucleotide
  modified_base 21: mod_base = OTHER; note = 2'-OMe modified nucleotide
  modified_base 23..24: mod_base = OTHER; note = 2'-OMe modified nucleotide
  modified_base 26: mod_base = OTHER; note = 2'-OMe modified nucleotide
  modified_base 2: mod_base = OTHER; note = 2-deoxy-2-fluoro ribonucleotide
  modified_base 4: mod_base = OTHER; note = 2-deoxy-2-fluoro ribonucleotide
  modified_base 6: mod_base = OTHER; note = 2-deoxy-2-fluoro ribonucleotide
  modified_base 8: mod_base = OTHER; note = 2-deoxy-2-fluoro ribonucleotide
  modified_base 10..11: mod_base = OTHER; note = 2-deoxy-2-fluoro ribonucleotide
  modified_base 14: mod_base = OTHER; note = 2-deoxy-2-fluoro ribonucleotide
  modified_base 16: mod_base = OTHER; note = 2-deoxy-2-fluoro ribonucleotide
  modified_base 18: mod_base = OTHER; note = 2-deoxy-2-fluoro ribonucleotide
  modified_base 20: mod_base = OTHER; note = 2-deoxy-2-fluoro ribonucleotide
  modified_base 22: mod_base = OTHER; note = 2-deoxy-2-fluoro ribonucleotide
  modified_base 1..2: mod_base = OTHER; note = phosphorothioate internucleotide linkage
  modified_base 2..3: mod_base = OTHER; note = phosphorothioate internucleotide linkage
  modified_base 22..23: mod_base = OTHER; note = phosphorothioate internucleotide linkage
  modified_base 23..24: mod_base = OTHER; note = phosphorothioate internucleotide linkage
tgagaatgagcctcgataactcttat

SEQ ID NO: 607 - RNA, 26 nt, synthetic construct
  source 1..26: mol_type = other RNA
  modified_base 1: mod_base = OTHER; note = 2'-OMe modified nucleotide
  modified_base 3: mod_base = OTHER; note = 2'-OMe modified nucleotide
  modified_base 5: mod_base = OTHER; note = 2'-OMe modified nucleotide
  modified_base 7: mod_base = OTHER; note = 2'-OMe modified nucleotide
  modified_base 9: mod_base = OTHER; note = 2'-OMe modified nucleotide
  modified_base 13: mod_base = OTHER; note = 2'-OMe modified nucleotide
  modified_base 15: mod_base = OTHER; note = 2'-OMe modified nucleotide
  modified_base 17: mod_base = OTHER; note = 2'-OMe modified nucleotide
  modified_base 19: mod_base = OTHER; note = 2'-OMe modified nucleotide
  modified_base 21: mod_base = OTHER; note = 2'-OMe modified nucleotide
  modified_base 23..24: mod_base = OTHER; note = 2'-OMe modified nucleotide
  modified_base 26: mod_base = OTHER; note = 2'-OMe modified nucleotide
  modified_base 2: mod_base = OTHER; note = 2-deoxy-2-fluoro ribonucleotide
  modified_base 4: mod_base = OTHER; note = 2-deoxy-2-fluoro ribonucleotide
  modified_base 6: mod_base = OTHER; note = 2-deoxy-2-fluoro ribonucleotide
  modified_base 8: mod_base = OTHER; note = 2-deoxy-2-fluoro ribonucleotide
  modified_base 10..12: mod_base = OTHER; note = 2-deoxy-2-fluoro ribonucleotide
  modified_base 14: mod_base = OTHER; note = 2-deoxy-2-fluoro ribonucleotide
  modified_base 16: mod_base = OTHER; note = 2-deoxy-2-fluoro ribonucleotide
  modified_base 18: mod_base = OTHER; note = 2-deoxy-2-fluoro ribonucleotide
  modified_base 20: mod_base = OTHER; note = 2-deoxy-2-fluoro ribonucleotide
  modified_base 22: mod_base = OTHER; note = 2-deoxy-2-fluoro ribonucleotide
  modified_base 1..2: mod_base = OTHER; note = phosphorothioate internucleotide linkage
  modified_base 2..3: mod_base = OTHER; note = phosphorothioate internucleotide linkage
  modified_base 22..23: mod_base = OTHER; note = phosphorothioate internucleotide linkage
  modified_base 23..24: mod_base = OTHER; note = phosphorothioate internucleotide linkage
tgagaatgagcctcgataactcttat

SEQ ID NO: 608 - RNA, 26 nt, synthetic construct
  source 1..26: mol_type = other RNA
  modified_base 1: mod_base = OTHER; note = 2'-OMe modified nucleotide
  modified_base 3..5: mod_base = OTHER; note = 2'-OMe modified nucleotide
  modified_base 7..9: mod_base = OTHER; note = 2'-OMe modified nucleotide
  modified_base 11..13: mod_base = OTHER; note = 2'-OMe modified nucleotide
  modified_base 15: mod_base = OTHER; note = 2'-OMe modified nucleotide
  modified_base 17..19: mod_base = OTHER; note = 2'-OMe modified nucleotide
  modified_base 21: mod_base = OTHER; note = 2'-OMe modified nucleotide
  modified_base 23..24: mod_base = OTHER; note = 2'-OMe modified nucleotide
  modified_base 26: mod_base = OTHER; note = 2'-OMe modified nucleotide
  modified_base 2: mod_base = OTHER; note = 2-deoxy-2-fluoro ribonucleotide
  modified_base 6: mod_base = OTHER; note = 2-deoxy-2-fluoro ribonucleotide
  modified_base 10: mod_base = OTHER; note = 2-deoxy-2-fluoro ribonucleotide
  modified_base 14: mod_base = OTHER; note = 2-deoxy-2-fluoro ribonucleotide
  modified_base 16: mod_base = OTHER; note = 2-deoxy-2-fluoro ribonucleotide
  modified_base 20: mod_base = OTHER; note = 2-deoxy-2-fluoro ribonucleotide
  modified_base 22: mod_base = OTHER; note = 2-deoxy-2-fluoro ribonucleotide
  modified_base 1..2: mod_base = OTHER; note = phosphorothioate internucleotide linkage
  modified_base 2..3: mod_base = OTHER; note = phosphorothioate internucleotide linkage
  modified_base 22..23: mod_base = OTHER; note = phosphorothioate internucleotide linkage
  modified_base 23..24: mod_base = OTHER; note = phosphorothioate internucleotide linkage
tgagaatgagcctcgataactcttat

SEQ ID NO: 609 - RNA, 26 nt, synthetic construct
  source 1..26: mol_type = other RNA
  modified_base 1: mod_base = OTHER; note = 2'-OMe modified nucleotide
  modified_base 3..7: mod_base = OTHER; note = 2'-OMe modified nucleotide
  modified_base 9..13: mod_base = OTHER; note = 2'-OMe modified nucleotide
  modified_base 15..17: mod_base = OTHER; note = 2'-OMe modified nucleotide
  modified_base 19: mod_base = OTHER; note = 2'-OMe modified nucleotide
  modified_base 21: mod_base = OTHER; note = 2'-OMe modified nucleotide
  modified_base 23..24: mod_base = OTHER; note = 2'-OMe modified nucleotide
  modified_base 26: mod_base = OTHER; note = 2'-OMe modified nucleotide
  modified_base 2: mod_base = OTHER; note = 2-deoxy-2-fluoro ribonucleotide
  modified_base 8: mod_base = OTHER; note = 2-deoxy-2-fluoro ribonucleotide
  modified_base 14: mod_base = OTHER; note = 2-deoxy-2-fluoro ribonucleotide
  modified_base 18: mod_base = OTHER; note = 2-deoxy-2-fluoro ribonucleotide
  modified_base 20: mod_base = OTHER; note = 2-deoxy-2-fluoro ribonucleotide
  modified_base 22: mod_base = OTHER; note = 2-deoxy-2-fluoro ribonucleotide
  modified_base 1..2: mod_base = OTHER; note = phosphorothioate internucleotide linkage
  modified_base 2..3: mod_base = OTHER; note = phosphorothioate internucleotide linkage
  modified_base 22..23: mod_base = OTHER; note = phosphorothioate internucleotide linkage
  modified_base 23..24: mod_base = OTHER; note = phosphorothioate internucleotide linkage
tgagaatgagcctcgataactcttat

SEQ ID NO: 610 - RNA, 26 nt, synthetic construct
  source 1..26: mol_type = other RNA
  modified_base 1: mod_base = OTHER; note = 2'-OMe modified nucleotide
  modified_base 3..7: mod_base = OTHER; note = 2'-OMe modified nucleotide
  modified_base 9..13: mod_base = OTHER; note = 2'-OMe modified nucleotide
  modified_base 15..17: mod_base = OTHER; note = 2'-OMe modified nucleotide
  modified_base 19..24: mod_base = OTHER; note = 2'-OMe modified nucleotide
  modified_base 26: mod_base = OTHER; note = 2'-OMe modified nucleotide
  modified_base 2: mod_base = OTHER; note = 2-deoxy-2-fluoro ribonucleotide
  modified_base 8: mod_base = OTHER; note = 2-deoxy-2-fluoro ribonucleotide
  modified_base 14: mod_base = OTHER; note = 2-deoxy-2-fluoro ribonucleotide
  modified_base 18: mod_base = OTHER; note = 2-deoxy-2-fluoro ribonucleotide
  modified_base 1..2: mod_base = OTHER; note = phosphorothioate internucleotide linkage
  modified_base 2..3: mod_base = OTHER; note = phosphorothioate internucleotide linkage
  modified_base 22..23: mod_base = OTHER; note = phosphorothioate internucleotide linkage
  modified_base 23..24: mod_base = OTHER; note = phosphorothioate internucleotide linkage
tgagaatgagcctcgataactcttat

SEQ ID NO: 611 - RNA, 26 nt, synthetic construct
  source 1..26: mol_type = other RNA
  modified_base 1: mod_base = OTHER; note = 2'-OMe modified nucleotide
  modified_base 3: mod_base = OTHER; note = 2'-OMe modified nucleotide
  modified_base 5: mod_base = OTHER; note = 2'-OMe modified nucleotide
  modified_base 7..9: mod_base = OTHER; note = 2'-OMe modified nucleotide
  modified_base 11..13: mod_base = OTHER; note = 2'-OMe modified nucleotide
  modified_base 15..19: mod_base = OTHER; note = 2'-OMe modified nucleotide
  modified_base 21: mod_base = OTHER; note = 2'-OMe modified nucleotide
  modified_base 23..24: mod_base = OTHER; note = 2'-OMe modified nucleotide
  modified_base 26: mod_base = OTHER; note = 2'-OMe modified nucleotide
  modified_base 2: mod_base = OTHER; note = 2-deoxy-2-fluoro ribonucleotide
  modified_base 4: mod_base = OTHER; note = 2-deoxy-2-fluoro ribonucleotide
  modified_base 6: mod_base = OTHER; note = 2-deoxy-2-fluoro ribonucleotide
  modified_base 10: mod_base = OTHER; note = 2-deoxy-2-fluoro ribonucleotide
  modified_base 14: mod_base = OTHER; note = 2-deoxy-2-fluoro ribonucleotide
  modified_base 20: mod_base = OTHER; note = 2-deoxy-2-fluoro ribonucleotide
  modified_base 22: mod_base = OTHER; note = 2-deoxy-2-fluoro ribonucleotide
  modified_base 1..2: mod_base = OTHER; note = phosphorothioate internucleotide linkage
  modified_base 2..3: mod_base = OTHER; note = phosphorothioate internucleotide linkage
  modified_base 22..23: mod_base = OTHER; note = phosphorothioate internucleotide linkage
  modified_base 23..24: mod_base = OTHER; note = phosphorothioate internucleotide linkage
tgagaatgagcctcgataactcttat

SEQ ID NO: 612 - RNA, 26 nt, synthetic construct
  source 1..26: mol_type = other RNA
  modified_base 1: mod_base = OTHER; note = 2'-OMe modified nucleotide
  modified_base 3..13: mod_base = OTHER; note = 2'-OMe modified nucleotide
  modified_base 15..19: mod_base = OTHER; note = 2'-OMe modified nucleotide
  modified_base 21: mod_base = OTHER; note = 2'-OMe modified nucleotide
  modified_base 23..24: mod_base = OTHER; note = 2'-OMe modified nucleotide
  modified_base 26: mod_base = OTHER; note = 2'-OMe modified nucleotide
  modified_base 2: mod_base = OTHER; note = 2-deoxy-2-fluoro ribonucleotide
  modified_base 14: mod_base = OTHER; note = 2-deoxy-2-fluoro ribonucleotide
  modified_base 20: mod_base = OTHER; note = 2-deoxy-2-fluoro ribonucleotide
  modified_base 22: mod_base = OTHER; note = 2-deoxy-2-fluoro ribonucleotide
  modified_base 1..2: mod_base = OTHER; note = phosphorothioate internucleotide linkage
  modified_base 2..3: mod_base = OTHER; note = phosphorothioate internucleotide linkage
  modified_base 22..23: mod_base = OTHER; note = phosphorothioate internucleotide linkage
  modified_base 23..24: mod_base = OTHER; note = phosphorothioate internucleotide linkage
tgagaatgagcctcgataactcttat

SEQ ID NO: 613 - RNA, 26 nt, synthetic construct
  source 1..26: mol_type = other RNA
  modified_base 1: mod_base = OTHER; note = 2'-OMe modified nucleotide
  modified_base 3..13: mod_base = OTHER; note = 2'-OMe modified nucleotide
  modified_base 15..21: mod_base = OTHER; note = 2'-OMe modified nucleotide
  modified_base 23..24: mod_base = OTHER; note = 2'-OMe modified nucleotide
  modified_base 26: mod_base = OTHER; note = 2'-OMe modified nucleotide
  modified_base 2: mod_base = OTHER; note = 2-deoxy-2-fluoro ribonucleotide
  modified_base 14: mod_base = OTHER; note = 2-deoxy-2-fluoro ribonucleotide
  modified_base 22: mod_base = OTHER; note = 2-deoxy-2-fluoro ribonucleotide
  modified_base 1..2: mod_base = OTHER; note = phosphorothioate internucleotide linkage
  modified_base 2..3: mod_base = OTHER; note = phosphorothioate internucleotide linkage
  modified_base 22..23: mod_base = OTHER; note = phosphorothioate internucleotide linkage
  modified_base 23..24: mod_base = OTHER; note = phosphorothioate internucleotide linkage
tgagaatgagcctcgataactcttat

SEQ ID NO: 614 - RNA, 26 nt, synthetic construct
  source 1..26: mol_type = other RNA
  modified_base 1: mod_base = OTHER; note = 2'-OMe modified nucleotide
  modified_base 3..13: mod_base = OTHER; note = 2'-OMe modified nucleotide
  modified_base 15..19: mod_base = OTHER; note = 2'-OMe modified nucleotide
  modified_base 21..24: mod_base = OTHER; note = 2'-OMe modified nucleotide
  modified_base 26: mod_base = OTHER; note = 2'-OMe modified nucleotide
  modified_base 2: mod_base = OTHER; note = 2-deoxy-2-fluoro ribonucleotide
  modified_base 14: mod_base = OTHER; note = 2-deoxy-2-fluoro ribonucleotide
  modified_base 20: mod_base = OTHER; note = 2-deoxy-2-fluoro ribonucleotide
  modified_base 1..2: mod_base = OTHER; note = phosphorothioate internucleotide linkage
  modified_base 2..3: mod_base = OTHER; note = phosphorothioate internucleotide linkage
  modified_base 22..23: mod_base = OTHER; note = phosphorothioate internucleotide linkage
  modified_base 23..24: mod_base = OTHER; note = phosphorothioate internucleotide linkage
tgagaatgagcctcgataactcttat

SEQ ID NO: 615 - RNA, 26 nt, synthetic construct
  source 1..26: mol_type = other RNA
  modified_base 1: mod_base = OTHER; note = 2'-OMe modified nucleotide
  modified_base 3..13: mod_base = OTHER; note = 2'-OMe modified nucleotide
  modified_base 15..24: mod_base = OTHER; note = 2'-OMe modified nucleotide
  modified_base 26: mod_base = OTHER; note = 2'-OMe modified nucleotide
  modified_base 2: mod_base = OTHER; note = 2-deoxy-2-fluoro ribonucleotide
  modified_base 14: mod_base = OTHER; note = 2-deoxy-2-fluoro ribonucleotide
  modified_base 1..2: mod_base = OTHER; note = phosphorothioate internucleotide linkage
  modified_base 2..3: mod_base = OTHER; note = phosphorothioate internucleotide linkage
  modified_base 22..23: mod_base = OTHER; note = phosphorothioate internucleotide linkage
  modified_base 23..24: mod_base = OTHER; note = phosphorothioate internucleotide linkage
tgagaatgagcctcgataactcttat

SEQ ID NO: 616 - RNA, 26 nt, synthetic construct
  source 1..26: mol_type = other RNA
  modified_base 1: mod_base = OTHER; note = 2'-OMe modified nucleotide
  modified_base 3: mod_base = OTHER; note = 2'-OMe modified nucleotide
  modified_base 5: mod_base = OTHER; note = 2'-OMe modified nucleotide
  modified_base 7..9: mod_base = OTHER; note = 2'-OMe modified nucleotide
  modified_base 11..12: mod_base = OTHER; note = 2'-OMe modified nucleotide
  modified_base 15..19: mod_base = OTHER; note = 2'-OMe modified nucleotide
  modified_base 21: mod_base = OTHER; note = 2'-OMe modified nucleotide
  modified_base 23..24: mod_base = OTHER; note = 2'-OMe modified nucleotide
  modified_base 26: mod_base = OTHER; note = 2'-OMe modified nucleotide
  modified_base 2: mod_base = OTHER; note = 2-deoxy-2-fluoro ribonucleotide
  modified_base 4: mod_base = OTHER; note = 2-deoxy-2-fluoro ribonucleotide
  modified_base 6: mod_base = OTHER; note = 2-deoxy-2-fluoro ribonucleotide
  modified_base 10: mod_base = OTHER; note = 2-deoxy-2-fluoro ribonucleotide
  modified_base 13..14: mod_base = OTHER; note = 2-deoxy-2-fluoro ribonucleotide
  modified_base 20: mod_base = OTHER; note = 2-deoxy-2-fluoro ribonucleotide
  modified_base 22: mod_base = OTHER; note = 2-deoxy-2-fluoro ribonucleotide
  modified_base 1..2: mod_base = OTHER; note = phosphorothioate internucleotide linkage
  modified_base 2..3: mod_base = OTHER; note = phosphorothioate internucleotide linkage
  modified_base 22..23: mod_base = OTHER; note = phosphorothioate internucleotide linkage
  modified_base 23..24: mod_base = OTHER; note = phosphorothioate internucleotide linkage
tgagaatgagcctcgataactcttat

SEQ ID NO: 617 - RNA, 26 nt, synthetic construct
  source 1..26: mol_type = other RNA
  modified_base 1: mod_base = OTHER; note = 2'-OMe modified nucleotide
  modified_base 3..12: mod_base = OTHER; note = 2'-OMe modified nucleotide
  modified_base 15..19: mod_base = OTHER; note = 2'-OMe modified nucleotide
  modified_base 21: mod_base = OTHER; note = 2'-OMe modified nucleotide
  modified_base 23..24: mod_base = OTHER; note = 2'-OMe modified nucleotide
  modified_base 26: mod_base = OTHER; note = 2'-OMe modified nucleotide
  modified_base 2: mod_base = OTHER; note = 2-deoxy-2-fluoro ribonucleotide
  modified_base 13..14: mod_base = OTHER; note = 2-deoxy-2-fluoro ribonucleotide
  modified_base 20: mod_base = OTHER; note = 2-deoxy-2-fluoro ribonucleotide
  modified_base 22: mod_base = OTHER; note = 2-deoxy-2-fluoro ribonucleotide
  modified_base 1..2: mod_base = OTHER; note = phosphorothioate internucleotide linkage
  modified_base 2..3: mod_base = OTHER; note = phosphorothioate internucleotide linkage
  modified_base 22..23: mod_base = OTHER; note = phosphorothioate internucleotide linkage
  modified_base 23..24: mod_base = OTHER; note = phosphorothioate internucleotide linkage
tgagaatgagcctcgataactcttat

SEQ ID NO: 618 - RNA, 26 nt, synthetic construct
  source 1..26: mol_type = other RNA
  modified_base 1: mod_base = OTHER; note = 2'-OMe modified nucleotide
  modified_base 3..12: mod_base = OTHER; note = 2'-OMe modified nucleotide
  modified_base 15..21: mod_base = OTHER; note = 2'-OMe modified nucleotide
  modified_base 23..24: mod_base = OTHER; note = 2'-OMe modified nucleotide
  modified_base 26: mod_base = OTHER; note = 2'-OMe modified nucleotide
  modified_base 2: mod_base = OTHER; note = 2-deoxy-2-fluoro ribonucleotide
  modified_base 13..14: mod_base = OTHER; note = 2-deoxy-2-fluoro ribonucleotide
  modified_base 22: mod_base = OTHER; note = 2-deoxy-2-fluoro ribonucleotide
  modified_base 1..2: mod_base = OTHER; note = phosphorothioate internucleotide linkage
  modified_base 2..3: mod_base = OTHER; note = phosphorothioate internucleotide linkage
  modified_base 22..23: mod_base = OTHER; note = phosphorothioate internucleotide linkage
  modified_base 23..24: mod_base = OTHER; note = phosphorothioate internucleotide linkage
tgagaatgagcctcgataactcttat

SEQ ID NO: 619 - RNA, 26 nt, synthetic construct
  source 1..26: mol_type = other RNA
  modified_base 1: mod_base = OTHER; note = 2'-OMe modified nucleotide
  modified_base 3..12: mod_base = OTHER; note = 2'-OMe modified nucleotide
  modified_base 15..19: mod_base = OTHER; note = 2'-OMe modified nucleotide
  modified_base 21..23: mod_base = OTHER; note = 2'-OMe modified nucleotide
  modified_base 24: mod_base = OTHER; note = 2'-OMe modified nucleotide
  modified_base 26: mod_base = OTHER; note = 2'-OMe modified nucleotide
  modified_base 2: mod_base = OTHER; note = 2-deoxy-2-fluoro ribonucleotide
  modified_base 13..14: mod_base = OTHER; note = 2-deoxy-2-fluoro ribonucleotide
  modified_base 20: mod_base = OTHER; note = 2-deoxy-2-fluoro ribonucleotide
  modified_base 1..2: mod_base = OTHER; note = phosphorothioate internucleotide linkage
  modified_base 2..3: mod_base = OTHER; note = phosphorothioate internucleotide linkage
  modified_base 22..23: mod_base = OTHER; note = phosphorothioate internucleotide linkage
  modified_base 23..24: mod_base = OTHER; note = phosphorothioate internucleotide linkage
tgagaatgagcctcgataactcttat

SEQ ID NO: 620 - RNA, 26 nt, synthetic construct
  source 1..26: mol_type = other RNA
  modified_base 1: mod_base = OTHER; note = 2'-OMe modified nucleotide
  modified_base 3..12: mod_base = OTHER; note = 2'-OMe modified nucleotide
  modified_base 15..24: mod_base = OTHER; note = 2'-OMe modified nucleotide
  modified_base 26: mod_base = OTHER; note = 2'-OMe modified nucleotide
  modified_base 2: mod_base = OTHER; note = 2-deoxy-2-fluoro ribonucleotide
  modified_base 13..14: mod_base = OTHER; note = 2-deoxy-2-fluoro ribonucleotide
  modified_base 1..2: mod_base = OTHER; note = phosphorothioate internucleotide linkage
  modified_base 2..3: mod_base = OTHER; note = phosphorothioate internucleotide linkage
  modified_base 22..23: mod_base = OTHER; note = phosphorothioate internucleotide linkage
  modified_base 23..24: mod_base = OTHER; note = phosphorothioate internucleotide linkage
tgagaatgagcctcgataactcttat

SEQ ID NO: 621 - RNA, 26 nt, synthetic construct
  source 1..26: mol_type = other RNA
  modified_base 1: mod_base = OTHER; note = 2'-OMe modified nucleotide
  modified_base 3: mod_base = OTHER; note = 2'-OMe modified nucleotide
  modified_base 5: mod_base = OTHER; note = 2'-OMe modified nucleotide
  modified_base 7..9: mod_base = OTHER; note = 2'-OMe modified nucleotide
  modified_base 11: mod_base = OTHER; note = 2'-OMe modified nucleotide
  modified_base 13: mod_base = OTHER; note = 2'-OMe modified nucleotide
  modified_base 15..19: mod_base = OTHER; note = 2'-OMe modified nucleotide
  modified_base 21: mod_base = OTHER; note = 2'-OMe modified nucleotide
  modified_base 23..24: mod_base = OTHER; note = 2'-OMe modified nucleotide
  modified_base 26: mod_base = OTHER; note = 2'-OMe modified nucleotide
  modified_base 2: mod_base = OTHER; note = 2-deoxy-2-fluoro ribonucleotide
  modified_base 4: mod_base = OTHER; note = 2-deoxy-2-fluoro ribonucleotide
  modified_base 6: mod_base = OTHER; note = 2-deoxy-2-fluoro ribonucleotide
  modified_base 10: mod_base = OTHER; note = 2-deoxy-2-fluoro ribonucleotide
  modified_base 12: mod_base = OTHER; note = 2-deoxy-2-fluoro ribonucleotide
  modified_base 14: mod_base = OTHER; note = 2-deoxy-2-fluoro ribonucleotide
  modified_base 20: mod_base = OTHER; note = 2-deoxy-2-fluoro ribonucleotide
  modified_base 22: mod_base = OTHER; note = 2-deoxy-2-fluoro ribonucleotide
  modified_base 1..2: mod_base = OTHER; note = phosphorothioate internucleotide linkage
  modified_base 2..3: mod_base = OTHER; note = phosphorothioate internucleotide linkage
  modified_base 22..23: mod_base = OTHER; note = phosphorothioate internucleotide linkage
  modified_base 23..24: mod_base = OTHER; note = phosphorothioate internucleotide linkage
tgagaatgagcctcgataactcttat

SEQ ID NO: 622 - RNA, 26 nt, synthetic construct
  source 1..26: mol_type = other RNA
  modified_base 1: mod_base = OTHER; note = 2'-OMe modified nucleotide
  modified_base 3..11: mod_base = OTHER; note = 2'-OMe modified nucleotide
  modified_base 13: mod_base = OTHER; note = 2'-OMe modified nucleotide
  modified_base 15..19: mod_base = OTHER; note = 2'-OMe modified nucleotide
  modified_base 21: mod_base = OTHER; note = 2'-OMe modified nucleotide
  modified_base 23..24: mod_base = OTHER; note = 2'-OMe modified nucleotide
  modified_base 26: mod_base = OTHER; note = 2'-OMe modified nucleotide
  modified_base 2: mod_base = OTHER; note = 2-deoxy-2-fluoro ribonucleotide
  modified_base 12: mod_base = OTHER; note = 2-deoxy-2-fluoro ribonucleotide
  modified_base 14: mod_base = OTHER; note = 2-deoxy-2-fluoro ribonucleotide
  modified_base 20: mod_base = OTHER; note = 2-deoxy-2-fluoro ribonucleotide
  modified_base 22: mod_base = OTHER; note = 2-deoxy-2-fluoro ribonucleotide
  modified_base 1..2: mod_base = OTHER; note = phosphorothioate internucleotide linkage
  modified_base 2..3: mod_base = OTHER; note = phosphorothioate internucleotide linkage
  modified_base 22..23: mod_base = OTHER; note = phosphorothioate internucleotide linkage
  modified_base 23..24: mod_base = OTHER; note = phosphorothioate internucleotide linkage
tgagaatgagcctcgataactcttat

SEQ ID NO: 623 - RNA, 26 nt, synthetic construct
  source 1..26: mol_type = other RNA
  modified_base 1: mod_base = OTHER; note = 2'-OMe modified nucleotide
  modified_base 3..11: mod_base = OTHER; note = 2'-OMe modified nucleotide
  modified_base 13: mod_base = OTHER; note = 2'-OMe modified nucleotide
  modified_base 15..21: mod_base = OTHER; note = 2'-OMe modified nucleotide
  modified_base 23..24: mod_base = OTHER; note = 2'-OMe modified nucleotide
  modified_base 26: mod_base = OTHER; note = 2'-OMe modified nucleotide
  modified_base 2: mod_base = OTHER; note = 2-deoxy-2-fluoro ribonucleotide
  modified_base 12: mod_base = OTHER; note = 2-deoxy-2-fluoro ribonucleotide
  modified_base 14: mod_base = OTHER; note = 2-deoxy-2-fluoro ribonucleotide
  modified_base 22: mod_base = OTHER; note = 2-deoxy-2-fluoro ribonucleotide
  modified_base 1..2: mod_base = OTHER; note = phosphorothioate internucleotide linkage
  modified_base 2..3: mod_base = OTHER; note = phosphorothioate internucleotide linkage
  modified_base 22..23: mod_base = OTHER; note = phosphorothioate internucleotide linkage
  modified_base 23..24: mod_base = OTHER; note = phosphorothioate internucleotide linkage
tgagaatgagcctcgataactcttat

SEQ ID NO: 624 - RNA, 26 nt, synthetic construct
  source 1..26: mol_type = other RNA
  modified_base 1: mod_base = OTHER; note = 2'-OMe modified nucleotide
  modified_base 3..11: mod_base = OTHER; note = 2'-OMe modified nucleotide
  modified_base 13: mod_base = OTHER; note = 2'-OMe modified nucleotide
  modified_base 15..19: mod_base = OTHER; note = 2'-OMe modified nucleotide
  modified_base 21..24: mod_base = OTHER; note = 2'-OMe modified nucleotide
  modified_base 26: mod_base = OTHER; note = 2'-OMe modified nucleotide
  modified_base 2: mod_base = OTHER; note = 2-deoxy-2-fluoro ribonucleotide
  modified_base 12: mod_base = OTHER; note = 2-deoxy-2-fluoro ribonucleotide
  modified_base 14: mod_base = OTHER; note = 2-deoxy-2-fluoro ribonucleotide
  modified_base 20: mod_base = OTHER; note = 2-deoxy-2-fluoro ribonucleotide
  modified_base 1..2: mod_base = OTHER; note = phosphorothioate internucleotide linkage
  modified_base 2..3: mod_base = OTHER; note = phosphorothioate internucleotide linkage
  modified_base 22..23: mod_base = OTHER; note = phosphorothioate internucleotide linkage
  modified_base 23..24: mod_base = OTHER; note = phosphorothioate internucleotide linkage
tgagaatgagcctcgataactcttat

SEQ ID NO: 625 - RNA, 26 nt, synthetic construct
  source 1..26: mol_type = other RNA
  modified_base 1: mod_base = OTHER; note = 2'-OMe modified nucleotide
  modified_base 3..11: mod_base = OTHER; note = 2'-OMe modified nucleotide
  modified_base 13: mod_base = OTHER; note = 2'-OMe modified nucleotide
  modified_base 15..24: mod_base = OTHER; note = 2'-OMe modified nucleotide
  modified_base 26: mod_base = OTHER; note = 2'-OMe modified nucleotide
  modified_base 2: mod_base = OTHER; note = 2-deoxy-2-fluoro ribonucleotide
  modified_base 12: mod_base = OTHER; note = 2-deoxy-2-fluoro ribonucleotide
  modified_base 14: mod_base = OTHER; note = 2-deoxy-2-fluoro ribonucleotide
  modified_base 1..2: mod_base = OTHER; note = phosphorothioate internucleotide linkage
  modified_base 2..3: mod_base = OTHER; note = phosphorothioate internucleotide linkage
  modified_base 22..23: mod_base = OTHER; note = phosphorothioate internucleotide linkage
  modified_base 23..24: mod_base = OTHER; note = phosphorothioate internucleotide linkage
tgagaatgagcctcgataactcttat

SEQ ID NO: 626 - RNA, 26 nt, synthetic construct
  source 1..26: mol_type = other RNA
  modified_base 1: mod_base = OTHER; note = 2'-OMe modified nucleotide
  modified_base 3: mod_base = OTHER; note = 2'-OMe modified nucleotide
  modified_base 5: mod_base = OTHER; note = 2'-OMe modified nucleotide
  modified_base 7..9: mod_base = OTHER; note = 2'-OMe modified nucleotide
  modified_base 12..13: mod_base = OTHER; note = 2'-OMe modified nucleotide
  modified_base 15..19: mod_base = OTHER; note = 2'-OMe modified nucleotide
  modified_base 21: mod_base = OTHER; note = 2'-OMe modified nucleotide
  modified_base 23..24: mod_base = OTHER; note = 2'-OMe modified nucleotide
  modified_base 26: mod_base = OTHER; note = 2'-OMe modified nucleotide
  modified_base 2: mod_base = OTHER; note = 2-deoxy-2-fluoro ribonucleotide
  modified_base 4: mod_base = OTHER; note = 2-deoxy-2-fluoro ribonucleotide
  modified_base 6: mod_base = OTHER; note = 2-deoxy-2-fluoro ribonucleotide
  modified_base 10..11: mod_base = OTHER; note = 2-deoxy-2-fluoro ribonucleotide
  modified_base 14: mod_base = OTHER; note = 2-deoxy-2-fluoro ribonucleotide
  modified_base 20: mod_base = OTHER; note = 2-deoxy-2-fluoro ribonucleotide
  modified_base 22: mod_base = OTHER; note = 2-deoxy-2-fluoro ribonucleotide
  modified_base 1..2: mod_base = OTHER; note = phosphorothioate internucleotide linkage
  modified_base 2..3: mod_base = OTHER; note = phosphorothioate internucleotide linkage
  modified_base 22..23: mod_base = OTHER; note = phosphorothioate internucleotide linkage
  modified_base 23..24: mod_base = OTHER; note = phosphorothioate internucleotide linkage
tgagaatgagcctcgataactcttat

SEQ ID NO: 627 - RNA, 26 nt, synthetic construct
  source 1..26: mol_type = other RNA
  modified_base 1: mod_base = OTHER; note = 2'-OMe modified nucleotide
  modified_base 3..13: mod_base = OTHER; note = 2'-OMe modified nucleotide
  modified_base 15..19: mod_base = OTHER; note = 2'-OMe modified nucleotide
  modified_base 21: mod_base = OTHER; note = 2'-OMe modified nucleotide
  modified_base 23..24: mod_base = OTHER; note = 2'-OMe modified nucleotide
  modified_base 26: mod_base = OTHER; note = 2'-OMe modified nucleotide
  modified_base 2: mod_base = OTHER; note = 2-deoxy-2-fluoro ribonucleotide
  modified_base 11: mod_base = OTHER; note = 2-deoxy-2-fluoro ribonucleotide
  modified_base 14: mod_base = OTHER; note = 2-deoxy-2-fluoro ribonucleotide
  modified_base 20: mod_base = OTHER; note = 2-deoxy-2-fluoro ribonucleotide
  modified_base 22: mod_base = OTHER; note = 2-deoxy-2-fluoro ribonucleotide
  modified_base 1..2: mod_base = OTHER; note = phosphorothioate internucleotide linkage
  modified_base 2..3: mod_base = OTHER; note = phosphorothioate internucleotide linkage
  modified_base 22..23: mod_base = OTHER; note = phosphorothioate internucleotide linkage
  modified_base 23..24: mod_base = OTHER; note = phosphorothioate internucleotide linkage
tgagaatgagcctcgataactcttat

SEQ ID NO: 628 - RNA, 26 nt, synthetic construct
  source 1..26: mol_type = other RNA
  modified_base 1: mod_base = OTHER; note = 2'-OMe modified nucleotide
  modified_base 3..13: mod_base = OTHER; note = 2'-OMe modified nucleotide
  modified_base 15..21: mod_base = OTHER; note = 2'-OMe modified nucleotide
  modified_base 23..24: mod_base = OTHER; note = 2'-OMe modified nucleotide
  modified_base 26: mod_base = OTHER; note = 2'-OMe modified nucleotide
  modified_base 2: mod_base = OTHER; note = 2-deoxy-2-fluoro ribonucleotide
  modified_base 11: mod_base = OTHER; note = 2-deoxy-2-fluoro ribonucleotide
  modified_base 14: mod_base = OTHER; note = 2-deoxy-2-fluoro ribonucleotide
  modified_base 22: mod_base = OTHER; note = 2-deoxy-2-fluoro ribonucleotide
  modified_base 1..2: mod_base = OTHER; note = phosphorothioate internucleotide linkage
  modified_base 2..3: mod_base = OTHER; note = phosphorothioate internucleotide linkage
  modified_base 22..23: mod_base = OTHER; note = phosphorothioate internucleotide linkage
  modified_base 23..24: mod_base = OTHER; note = phosphorothioate internucleotide linkage
tgagaatgagcctcgataactcttat

SEQ ID NO: 629 - RNA, 26 nt, synthetic construct
  source 1..26: mol_type = other RNA
  modified_base 1: mod_base = OTHER; note = 2'-OMe modified nucleotide
  modified_base 3..10: mod_base = OTHER; note = 2'-OMe modified nucleotide
  modified_base 12..13: mod_base = OTHER; note = 2'-OMe modified nucleotide
  modified_base 15..19: mod_base = OTHER; note = 2'-OMe modified nucleotide
  modified_base 21..24: mod_base = OTHER; note = 2'-OMe modified nucleotide
  modified_base 26: mod_base = OTHER; note = 2'-OMe modified nucleotide
  modified_base 2: mod_base = OTHER; note = 2-deoxy-2-fluoro ribonucleotide
  modified_base 11: mod_base = OTHER; note = 2-deoxy-2-fluoro ribonucleotide
  modified_base 14: mod_base = OTHER; note = 2-deoxy-2-fluoro ribonucleotide
  modified_base 20: mod_base = OTHER; note = 2-deoxy-2-fluoro ribonucleotide
  modified_base 1..2: mod_base = OTHER; note = phosphorothioate internucleotide linkage
  modified_base 2..3: mod_base = OTHER; note = phosphorothioate internucleotide linkage
  modified_base 22..23: mod_base = OTHER; note = phosphorothioate internucleotide linkage
  modified_base 23..24: mod_base = OTHER; note = phosphorothioate internucleotide linkage
tgagaatgagcctcgataactcttat

SEQ ID NO: 630 - RNA, 26 nt, synthetic construct
  source 1..26: mol_type = other RNA
  modified_base 1: mod_base = OTHER; note = 2'-OMe modified nucleotide
  modified_base 3..10: mod_base = OTHER; note = 2'-OMe modified nucleotide
  modified_base 12..13: mod_base = OTHER; note = 2'-OMe modified nucleotide
  modified_base 15..24: mod_base = OTHER; note = 2'-OMe modified nucleotide
  modified_base 26: mod_base = OTHER; note = 2'-OMe modified nucleotide
  modified_base 2: mod_base = OTHER; note = 2-deoxy-2-fluoro ribonucleotide
  modified_base 11: mod_base = OTHER; note = 2-deoxy-2-fluoro ribonucleotide
  modified_base 14: mod_base = OTHER; note = 2-deoxy-2-fluoro ribonucleotide
  modified_base 1..2: mod_base = OTHER; note = phosphorothioate internucleotide linkage
  modified_base 2..3: mod_base = OTHER; note = phosphorothioate internucleotide linkage
  modified_base 22..23: mod_base = OTHER; note = phosphorothioate internucleotide linkage
  modified_base 23..24: mod_base = OTHER; note = phosphorothioate internucleotide linkage
tgagaatgagcctcgataactcttat

SEQ ID NO: 631 - RNA, 26 nt, synthetic construct
  source 1..26: mol_type = other RNA
  modified_base 1: mod_base = OTHER; note = 2'-OMe modified nucleotide
  modified_base 3: mod_base = OTHER; note = 2'-OMe modified nucleotide
  modified_base 5: mod_base = OTHER; note = 2'-OMe modified nucleotide
  modified_base 7: mod_base = OTHER; note = 2'-OMe modified nucleotide
  modified_base 8: mod_base = OTHER; note = 2'-OMe modified nucleotide
  modified_base 9: mod_base = OTHER; note = 2'-OMe modified nucleotide
  modified_base 10: mod_base = OTHER; note = 2'-OMe modified nucleotide
  modified_base 11: mod_base = OTHER; note = 2'-OMe modified nucleotide
  modified_base 12: mod_base = OTHER; note = 2'-OMe modified nucleotide
  modified_base 13: mod_base = OTHER; note = 2'-OMe modified nucleotide
  modified_base 15: mod_base = OTHER; note = 2'-OMe modified nucleotide
  modified_base 17: mod_base = OTHER; note = 2'-OMe modified nucleotide
  modified_base 19: mod_base = OTHER; note = 2'-OMe modified nucleotide
  modified_base 21: mod_base = OTHER; note = 2'-OMe modified nucleotide
  modified_base 23: mod_base = OTHER; note = 2'-OMe modified nucleotide
  modified_base 24: mod_base = OTHER; note = 2'-OMe modified nucleotide
  modified_base 26: mod_base = OTHER; note = 2'-OMe modified nucleotide
  modified_base 2: mod_base = OTHER; note = 2-deoxy-2-fluoro ribonucleotide
  modified_base 4: mod_base = OTHER; note = 2-deoxy-2-fluoro ribonucleotide
  modified_base 6: mod_base = OTHER; note = 2-deoxy-2-fluoro ribonucleotide
  modified_base 14: mod_base = OTHER; note = 2-deoxy-2-fluoro ribonucleotide
  modified_base 16: mod_base = OTHER; note = 2-deoxy-2-fluoro ribonucleotide
  modified_base 18: mod_base = OTHER; note = 2-deoxy-2-fluoro ribonucleotide
  modified_base 20: mod_base = OTHER; note = 2-deoxy-2-fluoro ribonucleotide
  modified_base 22: mod_base = OTHER; note = 2-deoxy-2-fluoro ribonucleotide
  modified_base 1..2: mod_base = OTHER; note = phosphorothioate internucleotide linkage
  modified_base 2..3: mod_base = OTHER; note = phosphorothioate internucleotide linkage
  modified_base 22..23: mod_base = OTHER; note = phosphorothioate internucleotide linkage
  modified_base 23..24: mod_base = OTHER; note = phosphorothioate internucleotide linkage
tcgtataacaataaggggctgcctat

SEQ ID NO: 632 - RNA, 26 nt, synthetic construct
  source 1..26: mol_type = other RNA
  modified_base 1: mod_base = OTHER; note = 2'-OMe modified nucleotide
  modified_base 3: mod_base = OTHER; note = 2'-OMe modified nucleotide
  modified_base 5: mod_base = OTHER; note = 2'-OMe modified nucleotide
  modified_base 7: mod_base = OTHER; note = 2'-OMe modified nucleotide
  modified_base 9: mod_base = OTHER; note = 2'-OMe modified nucleotide
  modified_base 11..13: mod_base = OTHER; note = 2'-OMe modified nucleotide
  modified_base 15..19: mod_base = OTHER; note = 2'-OMe modified nucleotide
  modified_base 21: mod_base = OTHER; note = 2'-OMe modified nucleotide
  modified_base 23..24: mod_base = OTHER; note = 2'-OMe modified nucleotide
  modified_base 26: mod_base = OTHER; note = 2'-OMe modified nucleotide
  modified_base 2: mod_base = OTHER; note = 2-deoxy-2-fluoro ribonucleotide
  modified_base 4: mod_base = OTHER; note = 2-deoxy-2-fluoro ribonucleotide
  modified_base 6: mod_base = OTHER; note = 2-deoxy-2-fluoro ribonucleotide
  modified_base 8: mod_base = OTHER; note = 2-deoxy-2-fluoro ribonucleotide
  modified_base 10: mod_base = OTHER; note = 2-deoxy-2-fluoro ribonucleotide
  modified_base 14: mod_base = OTHER; note = 2-deoxy-2-fluoro ribonucleotide
  modified_base 20: mod_base = OTHER; note = 2-deoxy-2-fluoro ribonucleotide
  modified_base 22: mod_base = OTHER; note = 2-deoxy-2-fluoro ribonucleotide
  modified_base 1..2: mod_base = OTHER; note = phosphorothioate internucleotide linkage
  modified_base 2..3: mod_base = OTHER; note = phosphorothioate internucleotide linkage
  modified_base 22..23: mod_base = OTHER; note = phosphorothioate internucleotide linkage
  modified_base 23..24: mod_base = OTHER; note = phosphorothioate internucleotide linkage
tcgtataacaataaggggctgcctat

SEQ ID NO: 633 - RNA, 26 nt, synthetic construct
  source 1..26: mol_type = other RNA
  modified_base 1: mod_base = OTHER; note = 2'-OMe modified nucleotide
  modified_base 3..7: mod_base = OTHER; note = 2'-OMe modified nucleotide
  modified_base 9: mod_base = OTHER; note = 2'-OMe modified nucleotide
  modified_base 11..13: mod_base = OTHER; note = 2'-OMe modified nucleotide
  modified_base 15: mod_base = OTHER; note = 2'-OMe modified nucleotide
  modified_base 17: mod_base = OTHER; note = 2'-OMe modified nucleotide
  modified_base 19: mod_base = OTHER; note = 2'-OMe modified nucleotide
  modified_base 21: mod_base = OTHER; note = 2'-OMe modified nucleotide
  modified_base 23..24: mod_base = OTHER; note = 2'-OMe modified nucleotide
  modified_base 26: mod_base = OTHER; note = 2'-OMe modified nucleotide
  modified_base 2: mod_base = OTHER; note = 2-deoxy-2-fluoro ribonucleotide
  modified_base 8: mod_base = OTHER; note = 2-deoxy-2-fluoro ribonucleotide
  modified_base 10: mod_base = OTHER; note = 2-deoxy-2-fluoro ribonucleotide
  modified_base 14: mod_base = OTHER; note = 2-deoxy-2-fluoro ribonucleotide
  modified_base 16: mod_base = OTHER; note = 2-deoxy-2-fluoro ribonucleotide
  modified_base 18: mod_base = OTHER; note = 2-deoxy-2-fluoro ribonucleotide
  modified_base 20: mod_base = OTHER; note = 2-deoxy-2-fluoro ribonucleotide
  modified_base 22: mod_base = OTHER; note = 2-deoxy-2-fluoro ribonucleotide
  modified_base 1..2: mod_base = OTHER; note = phosphorothioate internucleotide linkage
  modified_base 2..3: mod_base = OTHER; note = phosphorothioate internucleotide linkage
  modified_base 22..23: mod_base = OTHER; note = phosphorothioate internucleotide linkage
  modified_base 23..24: mod_base = OTHER; note = phosphorothioate internucleotide linkage
tcgtataacaataaggggctgcctat

SEQ ID NO: 634 - RNA, 26 nt, synthetic construct
  source 1..26: mol_type = other RNA
  modified_base 1: mod_base = OTHER; note = 2'-OMe modified nucleotide
  modified_base 3: mod_base = OTHER; note = 2'-OMe modified nucleotide
  modified_base 5: mod_base = OTHER; note = 2'-OMe modified nucleotide
  modified_base 7: mod_base = OTHER; note = 2'-OMe modified nucleotide
  modified_base 9: mod_base = OTHER; note = 2'-OMe modified nucleotide
  modified_base 11..13: mod_base = OTHER; note = 2'-OMe modified nucleotide
  modified_base 15: mod_base = OTHER; note = 2'-OMe modified nucleotide
  modified_base 17: mod_base = OTHER; note = 2'-OMe modified nucleotide
  modified_base 19..24: mod_base = OTHER; note = 2'-OMe modified nucleotide
  modified_base 26: mod_base = OTHER; note = 2'-OMe modified nucleotide
  modified_base 2: mod_base = OTHER; note = 2-deoxy-2-fluoro ribonucleotide
  modified_base 4: mod_base = OTHER; note = 2-deoxy-2-fluoro ribonucleotide
  modified_base 6: mod_base = OTHER; note = 2-deoxy-2-fluoro ribonucleotide
  modified_base 8: mod_base = OTHER; note = 2-deoxy-2-fluoro ribonucleotide
  modified_base 10: mod_base = OTHER; note = 2-deoxy-2-fluoro ribonucleotide
  modified_base 14: mod_base = OTHER; note = 2-deoxy-2-fluoro ribonucleotide
  modified_base 16: mod_base = OTHER; note = 2-deoxy-2-fluoro ribonucleotide
  modified_base 18: mod_base = OTHER; note = 2-deoxy-2-fluoro ribonucleotide
  modified_base 1..2: mod_base = OTHER; note = phosphorothioate internucleotide linkage
  modified_base 2..3: mod_base = OTHER; note = phosphorothioate internucleotide linkage
  modified_base 22..23: mod_base = OTHER; note = phosphorothioate internucleotide linkage
  modified_base 23..24: mod_base = OTHER; note = phosphorothioate internucleotide linkage
tcgtataacaataaggggctgcctat

SEQ ID NO: 635 - RNA, 26 nt, synthetic construct
  source 1..26: mol_type = other RNA
  modified_base 1: mod_base = OTHER; note = 2'-OMe modified nucleotide
  modified_base 3: mod_base = OTHER; note = 2'-OMe modified nucleotide
  modified_base 5: mod_base = OTHER; note = 2'-OMe modified nucleotide
  modified_base 7..13: mod_base = OTHER; note = 2'-OMe modified nucleotide
  modified_base 15: mod_base = OTHER; note = 2'-OMe modified nucleotide
  modified_base 17: mod_base = OTHER; note = 2'-OMe modified nucleotide
  modified_base 19..24: mod_base = OTHER; note = 2'-OMe modified nucleotide
  modified_base 26: mod_base = OTHER; note = 2'-OMe modified nucleotide
  modified_base 2: mod_base = OTHER; note = 2-deoxy-2-fluoro ribonucleotide
  modified_base 4: mod_base = OTHER; note = 2-deoxy-2-fluoro ribonucleotide
  modified_base 6: mod_base = OTHER; note = 2-deoxy-2-fluoro ribonucleotide
  modified_base 14: mod_base = OTHER; note = 2-deoxy-2-fluoro ribonucleotide
  modified_base 16: mod_base = OTHER; note = 2-deoxy-2-fluoro ribonucleotide
  modified_base 18: mod_base = OTHER; note = 2-deoxy-2-fluoro ribonucleotide
  modified_base 1..2: mod_base = OTHER; note = phosphorothioate internucleotide linkage
  modified_base 2..3: mod_base = OTHER; note = phosphorothioate internucleotide linkage
  modified_base 22..23: mod_base = OTHER; note = phosphorothioate internucleotide linkage
  modified_base 23..24: mod_base = OTHER; note = phosphorothioate internucleotide linkage
tcgtataacaataaggggctgcctat

SEQ ID NO: 636 - RNA, 26 nt, synthetic construct
  source 1..26: mol_type = other RNA
  modified_base 1: mod_base = OTHER; note = 2'-OMe modified nucleotide
  modified_base 3..7: mod_base = OTHER; note = 2'-OMe modified nucleotide
  modified_base 9: mod_base = OTHER; note = 2'-OMe modified nucleotide
  modified_base 11..13: mod_base = OTHER; note = 2'-OMe modified nucleotide
  modified_base 15..19: mod_base = OTHER; note = 2'-OMe modified nucleotide
  modified_base 21: mod_base = OTHER; note = 2'-OMe modified nucleotide
  modified_base 23..24: mod_base = OTHER; note = 2'-OMe modified nucleotide
  modified_base 26: mod_base = OTHER; note = 2'-OMe modified nucleotide
  modified_base 2: mod_base = OTHER; note = 2-deoxy-2-fluoro ribonucleotide
  modified_base 8: mod_base = OTHER; note = 2-deoxy-2-fluoro ribonucleotide
  modified_base 10: mod_base = OTHER; note = 2-deoxy-2-fluoro ribonucleotide
  modified_base 14: mod_base = OTHER; note = 2-deoxy-2-fluoro ribonucleotide
  modified_base 20: mod_base = OTHER; note = 2-deoxy-2-fluoro ribonucleotide
  modified_base 22: mod_base = OTHER; note = 2-deoxy-2-fluoro ribonucleotide
  modified_base 1..2: mod_base = OTHER; note = phosphorothioate internucleotide linkage
  modified_base 2..3: mod_base = OTHER; note = phosphorothioate internucleotide linkage
  modified_base 22..23: mod_base = OTHER; note = phosphorothioate internucleotide linkage
  modified_base 23..24: mod_base = OTHER; note = phosphorothioate internucleotide linkage
tcgtataacaataaggggctgcctat

SEQ ID NO: 637 - RNA, 26 nt, synthetic construct
  source 1..26: mol_type = other RNA
  modified_base 1: mod_base = OTHER; note = 2'-OMe modified nucleotide
  modified_base 3: mod_base = OTHER; note = 2'-OMe modified nucleotide
  modified_base 5: mod_base = OTHER; note = 2'-OMe modified nucleotide
  modified_base 7..11: mod_base = OTHER; note = 2'-OMe modified nucleotide
  modified_base 13: mod_base = OTHER; note = 2'-OMe modified nucleotide
  modified_base 15: mod_base = OTHER; note = 2'-OMe modified nucleotide
  modified_base 17: mod_base = OTHER; note = 2'-OMe modified nucleotide
  modified_base 19: mod_base = OTHER; note = 2'-OMe modified nucleotide
  modified_base 21: mod_base = OTHER; note = 2'-OMe modified nucleotide
  modified_base 23..24: mod_base = OTHER; note = 2'-OMe modified nucleotide
  modified_base 26: mod_base = OTHER; note = 2'-OMe modified nucleotide
  modified_base 2: mod_base = OTHER; note = 2-deoxy-2-fluoro ribonucleotide
  modified_base 4: mod_base = OTHER; note = 2-deoxy-2-fluoro ribonucleotide
  modified_base 6: mod_base = OTHER; note = 2-deoxy-2-fluoro ribonucleotide
  modified_base 12: mod_base = OTHER; note = 2-deoxy-2-fluoro ribonucleotide
  modified_base 14: mod_base = OTHER; note = 2-deoxy-2-fluoro ribonucleotide
  modified_base 16: mod_base = OTHER; note = 2-deoxy-2-fluoro ribonucleotide
  modified_base 18: mod_base = OTHER; note = 2-deoxy-2-fluoro ribonucleotide
  modified_base 20: mod_base = OTHER; note = 2-deoxy-2-fluoro ribonucleotide
  modified_base 22: mod_base = OTHER; note = 2-deoxy-2-fluoro ribonucleotide
  modified_base 1..2: mod_base = OTHER; note = phosphorothioate internucleotide linkage
  modified_base 2..3: mod_base = OTHER; note = phosphorothioate internucleotide linkage
  modified_base 22..23: mod_base = OTHER; note = phosphorothioate internucleotide linkage
  modified_base 23..24: mod_base = OTHER; note = phosphorothioate internucleotide linkage
tcgtataacaataaggggctgcctat

SEQ ID NO: 638 - RNA, 26 nt, synthetic construct
  source 1..26: mol_type = other RNA
  modified_base 1: mod_base = OTHER; note = 2'-OMe modified nucleotide
  modified_base 3..7: mod_base = OTHER; note = 2'-OMe modified nucleotide
  modified_base 9: mod_base = OTHER; note = 2'-OMe modified nucleotide
  modified_base 11: mod_base = OTHER; note = 2'-OMe modified nucleotide
  modified_base 13: mod_base = OTHER; note = 2'-OMe modified nucleotide
  modified_base 15..19: mod_base = OTHER; note = 2'-OMe modified nucleotide
  modified_base 21: mod_base = OTHER; note = 2'-OMe modified nucleotide
  modified_base 23..24: mod_base = OTHER; note = 2'-OMe modified nucleotide
  modified_base 26: mod_base = OTHER; note = 2'-OMe modified nucleotide
  modified_base 2: mod_base = OTHER; note = 2-deoxy-2-fluoro ribonucleotide
  modified_base 8: mod_base = OTHER; note = 2-deoxy-2-fluoro ribonucleotide
  modified_base 10: mod_base = OTHER; note = 2-deoxy-2-fluoro ribonucleotide
  modified_base 12: mod_base = OTHER; note = 2-deoxy-2-fluoro ribonucleotide
  modified_base 14: mod_base = OTHER; note = 2-deoxy-2-fluoro ribonucleotide
  modified_base 20: mod_base = OTHER; note = 2-deoxy-2-fluoro ribonucleotide
  modified_base 22: mod_base = OTHER; note = 2-deoxy-2-fluoro ribonucleotide
  modified_base 1..2: mod_base = OTHER; note = phosphorothioate internucleotide linkage
  modified_base 2..3: mod_base = OTHER; note = phosphorothioate internucleotide linkage
  modified_base 22..23: mod_base = OTHER; note = phosphorothioate internucleotide linkage
  modified_base 23..24: mod_base = OTHER; note = phosphorothioate internucleotide linkage
tcgtataacaataaggggctgcctat

SEQ ID NO: 639 - RNA, 21 nt, synthetic construct
  source 1..21: mol_type = other RNA
  modified_base 20..21: mod_base = OTHER; note = 2'-deoxy nucleotide
  modified_base 1: mod_base = OTHER; note = 2'-OMe modified nucleotide
  modified_base 3: mod_base = OTHER; note = 2'-OMe modified nucleotide
  modified_base 5: mod_base = OTHER; note = 2'-OMe modified nucleotide
  modified_base 7: mod_base = OTHER; note = 2'-OMe modified nucleotide
  modified_base 9: mod_base = OTHER; note = 2'-OMe modified nucleotide
  modified_base 11: mod_base = OTHER; note = 2'-OMe modified nucleotide
  modified_base 13: mod_base = OTHER; note = 2'-OMe modified nucleotide
  modified_base 15: mod_base = OTHER; note = 2'-OMe modified nucleotide
  modified_base 17: mod_base = OTHER; note = 2'-OMe modified nucleotide
  modified_base 19: mod_base = OTHER; note = 2'-OMe modified nucleotide
  modified_base 2: mod_base = OTHER; note = 2-deoxy-2-fluoro ribonucleotide
  modified_base 4: mod_base = OTHER; note = 2-deoxy-2-fluoro ribonucleotide
  modified_base 6: mod_base = OTHER; note = 2-deoxy-2-fluoro ribonucleotide
  modified_base 8: mod_base = OTHER; note = 2-deoxy-2-fluoro ribonucleotide
  modified_base 10: mod_base = OTHER; note = 2-deoxy-2-fluoro ribonucleotide
  modified_base 12: mod_base = OTHER; note = 2-deoxy-2-fluoro ribonucleotide
  modified_base 14: mod_base = OTHER; note = 2-deoxy-2-fluoro ribonucleotide
  modified_base 16: mod_base = OTHER; note = 2-deoxy-2-fluoro ribonucleotide
  modified_base 18: mod_base = OTHER; note = 2-deoxy-2-fluoro ribonucleotide
  modified_base 1..2: mod_base = OTHER; note = phosphorothioate internucleotide linkage
  modified_base 2..3: mod_base = OTHER; note = phosphorothioate internucleotide linkage
  modified_base 19..20: mod_base = OTHER; note = phosphorothioate internucleotide linkage
  modified_base 20..21: mod_base = OTHER; note = phosphorothioate internucleotide linkage
  modified_base 20..21: mod_base = OTHER; note = Thymine
tgagaatgagcctcgataatt

SEQ ID NO: 640 - RNA, 26 nt, synthetic construct
  source 1..26: mol_type = other RNA
  modified_base 1: mod_base = OTHER; note = 2'-OMe modified nucleotide
  modified_base 3..7: mod_base = OTHER; note = 2'-OMe modified nucleotide
  modified_base 9: mod_base = OTHER; note = 2'-OMe modified nucleotide
  modified_base 11..13: mod_base = OTHER; note = 2'-OMe modified nucleotide
  modified_base 15..24: mod_base = OTHER; note = 2'-OMe modified nucleotide
  modified_base 26: mod_base = OTHER; note = 2'-OMe modified nucleotide
  modified_base 2: mod_base = OTHER; note = 2-deoxy-2-fluoro ribonucleotide
  modified_base 8: mod_base = OTHER; note = 2-deoxy-2-fluoro ribonucleotide
  modified_base 10: mod_base = OTHER; note = 2-deoxy-2-fluoro ribonucleotide
  modified_base 14: mod_base = OTHER; note = 2-deoxy-2-fluoro ribonucleotide
  modified_base 1..2: mod_base = OTHER; note = phosphorothioate internucleotide linkage
  modified_base 2..3: mod_base = OTHER; note = phosphorothioate internucleotide linkage
  modified_base 22..23: mod_base = OTHER; note = phosphorothioate internucleotide linkage
  modified_base 23..24: mod_base = OTHER; note = phosphorothioate internucleotide linkage
tcgtataacaataaggggctgcctat

SEQ ID NO: 641 - RNA, 26 nt, synthetic construct
  source 1..26: mol_type = other RNA
  modified_base 1: mod_base = OTHER; note = 2'-OMe modified nucleotide
  modified_base 3..13: mod_base = OTHER; note = 2'-OMe modified nucleotide
  modified_base 15..24: mod_base = OTHER; note = 2'-OMe modified nucleotide
  modified_base 26: mod_base = OTHER; note = 2'-OMe modified nucleotide
  modified_base 2: mod_base = OTHER; note = 2-deoxy-2-fluoro ribonucleotide
  modified_base 14: mod_base = OTHER; note = 2-deoxy-2-fluoro ribonucleotide
  modified_base 1..2: mod_base = OTHER; note = phosphorothioate internucleotide linkage
  modified_base 2..3: mod_base = OTHER; note = phosphorothioate internucleotide linkage
  modified_base 22..23: mod_base = OTHER; note = phosphorothioate internucleotide linkage
  modified_base 23..24: mod_base = OTHER; note = phosphorothioate internucleotide linkage
tcgtataacaataaggggctgcctat

SEQ ID NO: 642 - RNA, 26 nt, synthetic construct
  source 1..26: mol_type = other RNA
  modified_base 1: mod_base = OTHER; note = 2'-OMe modified nucleotide
  modified_base 3..7: mod_base = OTHER; note = 2'-OMe modified nucleotide
  modified_base 9: mod_base = OTHER; note = 2'-OMe modified nucleotide
  modified_base 11..13: mod_base = OTHER; note = 2'-OMe modified nucleotide
  modified_base 15..24: mod_base = OTHER; note = 2'-OMe modified nucleotide
  modified_base 26: mod_base = OTHER; note = 2'-OMe modified nucleotide
  modified_base 2: mod_base = OTHER; note = 2-deoxy-2-fluoro ribonucleotide
  modified_base 8: mod_base = OTHER; note = 2-deoxy-2-fluoro ribonucleotide
  modified_base 10: mod_base = OTHER; note = 2-deoxy-2-fluoro ribonucleotide
  modified_base 14: mod_base = OTHER; note = 2-deoxy-2-fluoro ribonucleotide
  modified_base 1..2: mod_base = OTHER; note = phosphorothioate internucleotide linkage
  modified_base 2..3: mod_base = OTHER; note = phosphorothioate internucleotide linkage
  modified_base 22..23: mod_base = OTHER; note = phosphorothioate internucleotide linkage
  modified_base 23..24: mod_base = OTHER; note = phosphorothioate internucleotide linkage
tgagaatgagcctcgataactcttat

SEQ ID NO: 643 - RNA, 26 nt, synthetic construct
  source 1..26: mol_type = other RNA
  modified_base 1: mod_base = OTHER; note = 2'-deoxy nucleotide
  modified_base 3: mod_base = OTHER; note = 2'-OMe modified nucleotide
  modified_base 5: mod_base = OTHER; note = 2'-OMe modified nucleotide
  modified_base 7: mod_base = OTHER; note = 2'-OMe modified nucleotide
  modified_base 9: mod_base = OTHER; note = 2'-OMe modified nucleotide
  modified_base 11..13: mod_base = OTHER; note = 2'-OMe modified nucleotide
  modified_base 15: mod_base = OTHER; note = 2'-OMe modified nucleotide
  modified_base 17: mod_base = OTHER; note = 2'-OMe modified nucleotide
  modified_base 19: mod_base = OTHER; note = 2'-OMe modified nucleotide
  modified_base 21: mod_base = OTHER; note = 2'-OMe modified nucleotide
  modified_base 23..24: mod_base = OTHER; note = 2'-OMe modified nucleotide
  modified_base 26: mod_base = OTHER; note = 2'-OMe modified nucleotide
  modified_base 2: mod_base = OTHER; note = 2-deoxy-2-fluoro ribonucleotide
  modified_base 4: mod_base = OTHER; note = 2-deoxy-2-fluoro ribonucleotide
  modified_base 6: mod_base = OTHER; note = 2-deoxy-2-fluoro ribonucleotide
  modified_base 8: mod_base = OTHER; note = 2-deoxy-2-fluoro ribonucleotide
  modified_base 10: mod_base = OTHER; note = 2-deoxy-2-fluoro ribonucleotide
  modified_base 14: mod_base = OTHER; note = 2-deoxy-2-fluoro ribonucleotide
  modified_base 16: mod_base = OTHER; note = 2-deoxy-2-fluoro ribonucleotide
  modified_base 18: mod_base = OTHER; note = 2-deoxy-2-fluoro ribonucleotide
  modified_base 20: mod_base = OTHER; note = 2-deoxy-2-fluoro ribonucleotide
  modified_base 22: mod_base = OTHER; note = 2-deoxy-2-fluoro ribonucleotide
  modified_base 1..2: mod_base = OTHER; note = phosphorothioate internucleotide linkage
  modified_base 1: mod_base = OTHER; note = Thymine
tgagaatgagcctcgataactcttat

SEQ ID NO: 644 - RNA, 26 nt, synthetic construct
  source 1..26: mol_type = other RNA
  modified_base 1: mod_base = OTHER; note = vinyl phosphonate deoxyribonucleotide
  modified_base 3: mod_base = OTHER; note = 2'-OMe modified nucleotide
  modified_base 5: mod_base = OTHER; note = 2'-OMe modified nucleotide
  modified_base 7: mod_base = OTHER; note = 2'-OMe modified nucleotide
  modified_base 9: mod_base = OTHER; note = 2'-OMe modified nucleotide
  modified_base 11..13: mod_base = OTHER; note = 2'-OMe modified nucleotide
  modified_base 15: mod_base = OTHER; note = 2'-OMe modified nucleotide
  modified_base 17: mod_base = OTHER; note = 2'-OMe modified nucleotide
  modified_base 19: mod_base = OTHER; note = 2'-OMe modified nucleotide
  modified_base 21..24: mod_base = OTHER; note = 2'-OMe modified nucleotide
  modified_base 26: mod_base = OTHER; note = 2'-OMe modified nucleotide
  modified_base 2: mod_base = OTHER; note = 2-deoxy-2-fluoro ribonucleotide
  modified_base 4: mod_base = OTHER; note = 2-deoxy-2-fluoro ribonucleotide
  modified_base 6: mod_base = OTHER; note = 2-deoxy-2-fluoro ribonucleotide
  modified_base 8: mod_base = OTHER; note = 2-deoxy-2-fluoro ribonucleotide
  modified_base 10: mod_base = OTHER; note = 2-deoxy-2-fluoro ribonucleotide
  modified_base 14: mod_base = OTHER; note = 2-deoxy-2-fluoro ribonucleotide
  modified_base 16: mod_base = OTHER; note = 2-deoxy-2-fluoro ribonucleotide
  modified_base 18: mod_base = OTHER; note = 2-deoxy-2-fluoro ribonucleotide
  modified_base 20: mod_base = OTHER; note = 2-deoxy-2-fluoro ribonucleotide
  modified_base 2..3: mod_base = OTHER; note = phosphorothioate internucleotide linkage
  modified_base 22..23: mod_base = OTHER; note = phosphorothioate internucleotide linkage
  modified_base 23..24: mod_base = OTHER; note = phosphorothioate internucleotide linkage
  modified_base 1: mod_base = OTHER; note = Thymine
tgagaatgagcctcgataactcttat

SEQ ID NO: 645 - RNA, 26 nt, synthetic construct
  source 1..26: mol_type = other RNA
  modified_base 1: mod_base = OTHER; note = vinyl phosphonate deoxyribonucleotide
  modified_base 3: mod_base = OTHER; note = 2'-OMe modified nucleotide
  modified_base 5: mod_base = OTHER; note = 2'-OMe modified nucleotide
  modified_base 7: mod_base = OTHER; note = 2'-OMe modified nucleotide
  modified_base 9: mod_base = OTHER; note = 2'-OMe modified nucleotide
  modified_base 11..13: mod_base = OTHER; note = 2'-OMe modified nucleotide
  modified_base 15: mod_base = OTHER; note = 2'-OMe modified nucleotide
  modified_base 17: mod_base = OTHER; note = 2'-OMe modified nucleotide
  modified_base 19: mod_base = OTHER; note = 2'-OMe modified nucleotide
  modified_base 21..24: mod_base = OTHER; note = 2'-OMe modified nucleotide
  modified_base 26: mod_base = OTHER; note = 2'-OMe modified nucleotide
  modified_base 2: mod_base = OTHER; note = 2-deoxy-2-fluoro ribonucleotide
  modified_base 4: mod_base = OTHER; note = 2-deoxy-2-fluoro ribonucleotide
  modified_base 6: mod_base = OTHER; note = 2-deoxy-2-fluoro ribonucleotide
  modified_base 8: mod_base = OTHER; note = 2-deoxy-2-fluoro ribonucleotide
  modified_base 10: mod_base = OTHER; note = 2-deoxy-2-fluoro ribonucleotide
  modified_base 14: mod_base = OTHER; note = 2-deoxy-2-fluoro ribonucleotide
  modified_base 16: mod_base = OTHER; note = 2-deoxy-2-fluoro ribonucleotide
  modified_base 18: mod_base = OTHER; note = 2-deoxy-2-fluoro ribonucleotide
  modified_base 20: mod_base = OTHER; note = 2-deoxy-2-fluoro ribonucleotide
  modified_base 1..2: mod_base = OTHER; note = phosphorothioate internucleotide linkage
  modified_base 2..3: mod_base = OTHER; note = phosphorothioate internucleotide linkage
  modified_base 22..23: mod_base = OTHER; note = phosphorothioate internucleotide linkage
  modified_base 23..24: mod_base = OTHER; note = phosphorothioate internucleotide linkage
  modified_base 1: mod_base = OTHER; note = Thymine
tgagaatgagcctcgataactcttat

SEQ ID NO: 646 - RNA, 26 nt, synthetic construct
  source 1..26: mol_type = other RNA
  modified_base 1: mod_base = OTHER; note = 2'-deoxy nucleotide
  modified_base 3: mod_base = OTHER; note = 2'-OMe modified nucleotide
  modified_base 5: mod_base = OTHER; note = 2'-OMe modified nucleotide
  modified_base 7: mod_base = OTHER; note = 2'-OMe modified nucleotide
  modified_base 9: mod_base = OTHER; note = 2'-OMe modified nucleotide
  modified_base 11..13: mod_base = OTHER; note = 2'-OMe modified nucleotide
  modified_base 15: mod_base = OTHER; note = 2'-OMe modified nucleotide
  modified_base 17: mod_base = OTHER; note = 2'-OMe modified nucleotide
  modified_base 19: mod_base = OTHER; note = 2'-OMe modified nucleotide
  modified_base 21..24: mod_base = OTHER; note = 2'-OMe modified nucleotide
  modified_base 26: mod_base = OTHER; note = 2'-OMe modified nucleotide
  modified_base 2: mod_base = OTHER; note = 2-deoxy-2-fluoro ribonucleotide
  modified_base 4: mod_base = OTHER; note = 2-deoxy-2-fluoro ribonucleotide
  modified_base 6: mod_base = OTHER; note = 2-deoxy-2-fluoro ribonucleotide
  modified_base 8: mod_base = OTHER; note = 2-deoxy-2-fluoro ribonucleotide
  modified_base 10: mod_base = OTHER; note = 2-deoxy-2-fluoro ribonucleotide
  modified_base 14: mod_base = OTHER; note = 2-deoxy-2-fluoro ribonucleotide
  modified_base 16: mod_base = OTHER; note = 2-deoxy-2-fluoro ribonucleotide
  modified_base 18: mod_base = OTHER; note = 2-deoxy-2-fluoro ribonucleotide
  modified_base 20: mod_base = OTHER; note = 2-deoxy-2-fluoro ribonucleotide
  modified_base 1..2: mod_base = OTHER; note = phosphorothioate internucleotide linkage
  modified_base 2..3: mod_base = OTHER; note = phosphorothioate internucleotide linkage
  modified_base 22..23: mod_base = OTHER; note = phosphorothioate internucleotide linkage
  modified_base 23..24: mod_base = OTHER; note = phosphorothioate internucleotide linkage
  modified_base 1: mod_base = OTHER; note = Thymine
tgagaatgagcctcgataactcttat

SEQ ID NO: 647 - RNA, 26 nt, synthetic construct
  source 1..26: mol_type = other RNA
  modified_base 1: mod_base = OTHER; note = vinyl phosphonate deoxyribonucleotide
  modified_base 3: mod_base = OTHER; note = 2'-OMe modified nucleotide
  modified_base 5: mod_base = OTHER; note = 2'-OMe modified nucleotide
  modified_base 7: mod_base = OTHER; note = 2'-OMe modified nucleotide
  modified_base 9: mod_base = OTHER; note = 2'-OMe modified nucleotide
  modified_base 11..13: mod_base = OTHER; note = 2'-OMe modified nucleotide
  modified_base 15: mod_base = OTHER; note = 2'-OMe modified nucleotide
  modified_base 17: mod_base = OTHER; note = 2'-OMe modified nucleotide
  modified_base 19: mod_base = OTHER; note = 2'-OMe modified nucleotide
  modified_base 21: mod_base = OTHER; note = 2'-OMe modified nucleotide
  modified_base 23..24: mod_base = OTHER; note = 2'-OMe modified nucleotide
  modified_base 26: mod_base = OTHER; note = 2'-OMe modified nucleotide
  modified_base 2: mod_base = OTHER; note = 2-deoxy-2-fluoro ribonucleotide
  modified_base 4: mod_base = OTHER; note = 2-deoxy-2-fluoro ribonucleotide
  modified_base 6: mod_base = OTHER; note = 2-deoxy-2-fluoro ribonucleotide
  modified_base 8: mod_base = OTHER; note = 2-deoxy-2-fluoro ribonucleotide
  modified_base 10: mod_base = OTHER; note = 2-deoxy-2-fluoro ribonucleotide
  modified_base 14: mod_base = OTHER; note = 2-deoxy-2-fluoro ribonucleotide
  modified_base 16: mod_base = OTHER; note = 2-deoxy-2-fluoro ribonucleotide
  modified_base 18: mod_base = OTHER; note = 2-deoxy-2-fluoro ribonucleotide
  modified_base 20: mod_base = OTHER; note = 2-deoxy-2-fluoro ribonucleotide
  modified_base 22: mod_base = OTHER; note = 2-deoxy-2-fluoro ribonucleotide
  modified_base 2..3: mod_base = OTHER; note = phosphorothioate internucleotide linkage
  modified_base 22..23: mod_base = OTHER; note = phosphorothioate internucleotide linkage
  modified_base 23..24: mod_base = OTHER; note = phosphorothioate internucleotide linkage
  modified_base 1: mod_base = OTHER; note = Thymine
tcgtataacaataaggggctgcctat

SEQ ID NO: 648 - RNA, 26 nt, synthetic construct
  source 1..26: mol_type = other RNA
  modified_base 1: mod_base = OTHER; note = vinyl phosphonate deoxyribonucleotide
  modified_base 3: mod_base = OTHER; note = 2'-OMe modified nucleotide
  modified_base 5: mod_base = OTHER; note = 2'-OMe modified nucleotide
  modified_base 7: mod_base = OTHER; note = 2'-OMe modified nucleotide
  modified_base 9: mod_base = OTHER; note = 2'-OMe modified nucleotide
  modified_base 11..13: mod_base = OTHER; note = 2'-OMe modified nucleotide
  modified_base 15: mod_base = OTHER; note = 2'-OMe modified nucleotide
  modified_base 17: mod_base = OTHER; note = 2'-OMe modified nucleotide
  modified_base 19: mod_base = OTHER; note = 2'-OMe modified nucleotide
  modified_base 21: mod_base = OTHER; note = 2'-OMe modified nucleotide
  modified_base 23..24: mod_base = OTHER; note = 2'-OMe modified nucleotide
  modified_base 26: mod_base = OTHER; note = 2'-OMe modified nucleotide
  modified_base 2: mod_base = OTHER; note = 2-deoxy-2-fluoro ribonucleotide
  modified_base 4: mod_base = OTHER; note = 2-deoxy-2-fluoro ribonucleotide
  modified_base 6: mod_base = OTHER; note = 2-deoxy-2-fluoro ribonucleotide
  modified_base 8: mod_base = OTHER; note = 2-deoxy-2-fluoro ribonucleotide
  modified_base 10: mod_base = OTHER; note = 2-deoxy-2-fluoro ribonucleotide
  modified_base 14: mod_base = OTHER; note = 2-deoxy-2-fluoro ribonucleotide
  modified_base 16: mod_base = OTHER; note = 2-deoxy-2-fluoro ribonucleotide
  modified_base 18: mod_base = OTHER; note = 2-deoxy-2-fluoro ribonucleotide
  modified_base 20: mod_base = OTHER; note = 2-deoxy-2-fluoro ribonucleotide
  modified_base 22: mod_base = OTHER; note = 2-deoxy-2-fluoro ribonucleotide
  modified_base 1..2: mod_base = OTHER; note = phosphorothioate internucleotide linkage
  modified_base 2..3: mod_base = OTHER; note = phosphorothioate internucleotide linkage
  modified_base 22..23: mod_base = OTHER; note = phosphorothioate internucleotide linkage
  modified_base 23..24: mod_base = OTHER; note = phosphorothioate internucleotide linkage
  modified_base 1: mod_base = OTHER; note = Thymine
tcgtataacaataaggggctgcctat

SEQ ID NO: 649 - RNA, 26 nt, synthetic construct
  source 1..26: mol_type = other RNA
  modified_base 1: mod_base = OTHER; note = 2'-OMe modified nucleotide
  modified_base 4..13: mod_base = OTHER; note = 2'-OMe modified nucleotide
  modified_base 15..24: mod_base = OTHER; note = 2'-OMe modified nucleotide
  modified_base 26: mod_base = OTHER; note = 2'-OMe modified nucleotide
  modified_base 2..3: mod_base = OTHER; note = 2-deoxy-2-fluoro ribonucleotide
  modified_base 14: mod_base = OTHER; note = 2-deoxy-2-fluoro ribonucleotide
  modified_base 1..2: mod_base = OTHER; note = phosphorothioate internucleotide linkage
  modified_base 2..3: mod_base = OTHER; note = phosphorothioate internucleotide linkage
  modified_base 22..23: mod_base = OTHER; note = phosphorothioate internucleotide linkage
  modified_base 23..24: mod_base = OTHER; note = phosphorothioate internucleotide linkage
tgagaatgagcctcgataactcttat

SEQ ID NO: 650 - RNA, 26 nt, synthetic construct
  source 1..26: mol_type = other RNA
  modified_base 1: mod_base = OTHER; note = 2'-OMe modified nucleotide
  modified_base 3: mod_base = OTHER; note = 2'-OMe modified nucleotide
  modified_base 5..13: mod_base = OTHER; note = 2'-OMe modified nucleotide
  modified_base 15..24: mod_base = OTHER; note = 2'-OMe modified nucleotide
  modified_base 26: mod_base = OTHER; note = 2'-OMe modified nucleotide
  modified_base 2: mod_base = OTHER; note = 2-deoxy-2-fluoro ribonucleotide
  modified_base 4: mod_base = OTHER; note = 2-deoxy-2-fluoro ribonucleotide
  modified_base 14: mod_base = OTHER; note = 2-deoxy-2-fluoro ribonucleotide
  modified_base 1..2: mod_base = OTHER; note = phosphorothioate internucleotide linkage
  modified_base 2..3: mod_base = OTHER; note = phosphorothioate internucleotide linkage
  modified_base 22..23: mod_base = OTHER; note = phosphorothioate internucleotide linkage
  modified_base 23..24: mod_base = OTHER; note = phosphorothioate internucleotide linkage
tgagaatgagcctcgataactcttat

SEQ ID NO: 651 - RNA, 26 nt, synthetic construct
  source 1..26: mol_type = other RNA
  modified_base 1: mod_base = OTHER; note = 2'-OMe modified nucleotide
  modified_base 3..4: mod_base = OTHER; note = 2'-OMe modified nucleotide
  modified_base 6..13: mod_base = OTHER; note = 2'-OMe modified nucleotide
  modified_base 15..24: mod_base = OTHER; note = 2'-OMe modified nucleotide
  modified_base 26: mod_base = OTHER; note = 2'-OMe modified nucleotide
  modified_base 2: mod_base = OTHER; note = 2-deoxy-2-fluoro ribonucleotide
  modified_base 5: mod_base = OTHER; note = 2-deoxy-2-fluoro ribonucleotide
  modified_base 14: mod_base = OTHER; note = 2-deoxy-2-fluoro ribonucleotide
  modified_base 1..2: mod_base = OTHER; note = phosphorothioate internucleotide linkage
  modified_base 2..3: mod_base = OTHER; note = phosphorothioate internucleotide linkage
  modified_base 22..23: mod_base = OTHER; note = phosphorothioate internucleotide linkage
  modified_base 23..24: mod_base = OTHER; note = phosphorothioate internucleotide linkage
tgagaatgagcctcgataactcttat

SEQ ID NO: 652 - RNA, 26 nt, synthetic construct
  source 1..26: mol_type = other RNA
  modified_base 1: mod_base = OTHER; note = 2'-OMe modified nucleotide
  modified_base 3..5: mod_base = OTHER; note = 2'-OMe modified nucleotide
  modified_base 7..13: mod_base = OTHER; note = 2'-OMe modified nucleotide
  modified_base 15..24: mod_base = OTHER; note = 2'-OMe modified nucleotide
  modified_base 26: mod_base = OTHER; note = 2'-OMe modified nucleotide
  modified_base 2: mod_base = OTHER; note = 2-deoxy-2-fluoro ribonucleotide
  modified_base 6: mod_base = OTHER; note = 2-deoxy-2-fluoro ribonucleotide
  modified_base 14: mod_base = OTHER; note = 2-deoxy-2-fluoro ribonucleotide
  modified_base 1..2: mod_base = OTHER; note = phosphorothioate internucleotide linkage
  modified_base 2..3: mod_base = OTHER; note = phosphorothioate internucleotide linkage
  modified_base 22..23: mod_base = OTHER; note = phosphorothioate internucleotide linkage
  modified_base 23..24: mod_base = OTHER; note = phosphorothioate internucleotide linkage
tgagaatgagcctcgataactcttat

SEQ ID NO: 653 - RNA, 26 nt, synthetic construct
  source 1..26: mol_type = other RNA
  modified_base 1: mod_base = OTHER; note = 2'-OMe modified nucleotide
  modified_base 3..6: mod_base = OTHER; note = 2'-OMe modified nucleotide
  modified_base 8..13: mod_base = OTHER; note = 2'-OMe modified nucleotide
  modified_base 15..24: mod_base = OTHER; note = 2'-OMe modified nucleotide
  modified_base 26: mod_base = OTHER; note = 2'-OMe modified nucleotide
  modified_base 2: mod_base = OTHER; note = 2-deoxy-2-fluoro ribonucleotide
  modified_base 7: mod_base = OTHER; note = 2-deoxy-2-fluoro ribonucleotide
  modified_base 14: mod_base = OTHER; note = 2-deoxy-2-fluoro ribonucleotide
  modified_base 1..2: mod_base = OTHER; note = phosphorothioate internucleotide linkage
  modified_base 2..3: mod_base = OTHER; note = phosphorothioate internucleotide linkage
  modified_base 22..23: mod_base = OTHER; note = phosphorothioate internucleotide linkage
  modified_base 23..24: mod_base = OTHER; note = phosphorothioate internucleotide linkage
tgagaatgagcctcgataactcttat

SEQ ID NO: 654 - RNA, 26 nt, synthetic construct
  source 1..26: mol_type = other RNA
  modified_base 1: mod_base = OTHER; note = 2'-OMe modified nucleotide
  modified_base 3..7: mod_base = OTHER; note = 2'-OMe modified nucleotide
  modified_base 9..13: mod_base = OTHER; note = 2'-OMe modified nucleotide
  modified_base 15..24: mod_base = OTHER; note = 2'-OMe modified nucleotide
  modified_base 26: mod_base = OTHER; note = 2'-OMe modified nucleotide
  modified_base 2: mod_base = OTHER; note = 2-deoxy-2-fluoro ribonucleotide
  modified_base 8: mod_base = OTHER; note = 2-deoxy-2-fluoro ribonucleotide
  modified_base 14: mod_base = OTHER; note = 2-deoxy-2-fluoro ribonucleotide
  modified_base 1..2: mod_base = OTHER; note = phosphorothioate internucleotide linkage
  modified_base 2..3: mod_base = OTHER; note = phosphorothioate internucleotide linkage
  modified_base 22..23: mod_base = OTHER; note = phosphorothioate internucleotide linkage
  modified_base 23..24: mod_base = OTHER; note = phosphorothioate internucleotide linkage
tgagaatgagcctcgataactcttat

SEQ ID NO: 655 - RNA, 26 nt, synthetic construct
  source 1..26: mol_type = other RNA
  modified_base 1: mod_base = OTHER; note = 2'-OMe modified nucleotide
  modified_base 3..9: mod_base = OTHER; note = 2'-OMe modified nucleotide
  modified_base 11..13: mod_base = OTHER; note = 2'-OMe modified nucleotide
  modified_base 15..24: mod_base = OTHER; note = 2'-OMe modified nucleotide
  modified_base 26: mod_base = OTHER; note = 2'-OMe modified nucleotide
  modified_base 2: mod_base = OTHER; note = 2-deoxy-2-fluoro ribonucleotide
  modified_base 10: mod_base = OTHER; note = 2-deoxy-2-fluoro ribonucleotide
  modified_base 14: mod_base = OTHER; note = 2-deoxy-2-fluoro ribonucleotide
  modified_base 1..2: mod_base = OTHER; note = phosphorothioate internucleotide linkage
  modified_base 2..3: mod_base = OTHER; note = phosphorothioate internucleotide linkage
  modified_base 22..23: mod_base = OTHER; note = phosphorothioate internucleotide linkage
  modified_base 23..24: mod_base = OTHER; note = phosphorothioate internucleotide linkage
tgagaatgagcctcgataactcttat

SEQ ID NO: 656 - RNA, 26 nt, synthetic construct
  source 1..26: mol_type = other RNA
  modified_base 1: mod_base = OTHER; note = 2'-OMe modified nucleotide
  modified_base 3: mod_base = OTHER; note = 2'-OMe modified nucleotide
  modified_base 5: mod_base = OTHER; note = 2'-OMe modified nucleotide
  modified_base 7: mod_base = OTHER; note = 2'-OMe modified nucleotide
  modified_base 9: mod_base = OTHER; note = 2'-OMe modified nucleotide
  modified_base 11..13: mod_base = OTHER; note = 2'-OMe modified nucleotide
  modified_base 15: mod_base = OTHER; note = 2'-OMe modified nucleotide
  modified_base 17: mod_base = OTHER; note = 2'-OMe modified nucleotide
  modified_base 19: mod_base = OTHER; note = 2'-OMe modified nucleotide
  modified_base 21: mod_base = OTHER; note = 2'-OMe modified nucleotide
  modified_base 23..24: mod_base = OTHER; note = 2'-OMe modified nucleotide
  modified_base 26: mod_base = OTHER; note = 2'-OMe modified nucleotide
  modified_base 2: mod_base = OTHER; note = 2-deoxy-2-fluoro ribonucleotide
  modified_base 4: mod_base = OTHER; note = 2-deoxy-2-fluoro ribonucleotide
  modified_base 6: mod_base = OTHER; note = 2-deoxy-2-fluoro ribonucleotide
  modified_base 8: mod_base = OTHER; note = 2-deoxy-2-fluoro ribonucleotide
  modified_base 10: mod_base = OTHER; note = 2-deoxy-2-fluoro ribonucleotide
  modified_base 14: mod_base = OTHER; note = 2-deoxy-2-fluoro ribonucleotide
  modified_base 16: mod_base = OTHER; note = 2-deoxy-2-fluoro ribonucleotide
  modified_base 18: mod_base = OTHER; note = 2-deoxy-2-fluoro ribonucleotide
  modified_base 20: mod_base = OTHER; note = 2-deoxy-2-fluoro ribonucleotide
  modified_base 22: mod_base = OTHER; note = 2-deoxy-2-fluoro ribonucleotide
  modified_base 1..2: mod_base = OTHER; note = phosphorothioate internucleotide linkage
  modified_base 2..3: mod_base = OTHER; note = phosphorothioate internucleotide linkage
  modified_base 22..23: mod_base = OTHER; note = phosphorothioate internucleotide linkage
  modified_base 23..24: mod_base = OTHER; note = phosphorothioate internucleotide linkage
tcgtataacaataaggcgctgcctat

SEQ ID NO: 657 - RNA, 26 nt, synthetic construct
  source 1..26: mol_type = other RNA
  modified_base 1: mod_base = OTHER; note = 2'-OMe modified nucleotide
  modified_base 3: mod_base = OTHER; note = 2'-OMe modified nucleotide
  modified_base 5: mod_base = OTHER; note = 2'-OMe modified nucleotide
  modified_base 7: mod_base = OTHER; note = 2'-OMe modified nucleotide
  modified_base 9: mod_base = OTHER; note = 2'-OMe modified nucleotide
  modified_base 11..13: mod_base = OTHER; note = 2'-OMe modified nucleotide
  modified_base 15..18: mod_base = OTHER; note = 2'-OMe modified nucleotide
  modified_base 20..21: mod_base = OTHER; note = 2'-OMe modified nucleotide
  modified_base 23..24: mod_base = OTHER; note = 2'-OMe modified nucleotide
  modified_base 26: mod_base = OTHER; note = 2'-OMe modified nucleotide
  modified_base 2: mod_base = OTHER; note = 2-deoxy-2-fluoro ribonucleotide
  modified_base 4: mod_base = OTHER; note = 2-deoxy-2-fluoro ribonucleotide
  modified_base 6: mod_base = OTHER; note = 2-deoxy-2-fluoro ribonucleotide
  modified_base 8: mod_base = OTHER; note = 2-deoxy-2-fluoro ribonucleotide
  modified_base 10: mod_base = OTHER; note = 2-deoxy-2-fluoro ribonucleotide
  modified_base 14: mod_base = OTHER; note = 2-deoxy-2-fluoro ribonucleotide
  modified_base 19: mod_base = OTHER; note = 2-deoxy-2-fluoro ribonucleotide
  modified_base 22: mod_base = OTHER; note = 2-deoxy-2-fluoro ribonucleotide
  modified_base 1..2: mod_base = OTHER; note = phosphorothioate internucleotide linkage
  modified_base 2..3: mod_base = OTHER; note = phosphorothioate internucleotide linkage
  modified_base 22..23: mod_base = OTHER; note = phosphorothioate internucleotide linkage
  modified_base 23..24: mod_base = OTHER; note = phosphorothioate internucleotide linkage
tcgtataacaataaggggctgcctat

SEQ ID NO: 658 - RNA, 26 nt, synthetic construct
  source 1..26: mol_type = other RNA
  modified_base 1: mod_base = OTHER; note = 2'-OMe modified nucleotide
  modified_base 3: mod_base = OTHER; note = 2'-OMe modified nucleotide
  modified_base 5: mod_base = OTHER; note = 2'-OMe modified nucleotide
  modified_base 7: mod_base = OTHER; note = 2'-OMe modified nucleotide
  modified_base 9: mod_base = OTHER; note = 2'-OMe modified nucleotide
  modified_base 11..13: mod_base = OTHER; note = 2'-OMe modified nucleotide
  modified_base 15..24: mod_base = OTHER; note = 2'-OMe modified nucleotide
  modified_base 26: mod_base = OTHER; note = 2'-OMe modified nucleotide
  modified_base 2: mod_base = OTHER; note = 2-deoxy-2-fluoro ribonucleotide
  modified_base 4: mod_base = OTHER; note = 2-deoxy-2-fluoro ribonucleotide
  modified_base 6: mod_base = OTHER; note = 2-deoxy-2-fluoro ribonucleotide
  modified_base 8: mod_base = OTHER; note = 2-deoxy-2-fluoro ribonucleotide
  modified_base 10: mod_base = OTHER; note = 2-deoxy-2-fluoro ribonucleotide
  modified_base 14: mod_base = OTHER; note = 2-deoxy-2-fluoro ribonucleotide
  modified_base 1..2: mod_base = OTHER; note = phosphorothioate internucleotide linkage
  modified_base 2..3: mod_base = OTHER; note = phosphorothioate internucleotide linkage
  modified_base 22..23: mod_base = OTHER; note = phosphorothioate internucleotide linkage
  modified_base 23..24: mod_base = OTHER; note = phosphorothioate internucleotide linkage
tcgtataacaataaggggctgcctat

SEQ ID NO: 659 - RNA, 26 nt, synthetic construct
  source 1..26: mol_type = other RNA
  modified_base 1: mod_base = OTHER; note = 2'-OMe modified nucleotide
  modified_base 4..7: mod_base = OTHER; note = 2'-OMe modified nucleotide
  modified_base 9: mod_base = OTHER; note = 2'-OMe modified nucleotide
  modified_base 11..13: mod_base = OTHER; note = 2'-OMe modified nucleotide
  modified_base 15..24: mod_base = OTHER; note = 2'-OMe modified nucleotide
  modified_base 26: mod_base = OTHER; note = 2'-OMe modified nucleotide
  modified_base 2..3: mod_base = OTHER; note = 2-deoxy-2-fluoro ribonucleotide
  modified_base 8: mod_base = OTHER; note = 2-deoxy-2-fluoro ribonucleotide
  modified_base 10: mod_base = OTHER; note = 2-deoxy-2-fluoro ribonucleotide
  modified_base 14: mod_base = OTHER; note = 2-deoxy-2-fluoro ribonucleotide
  modified_base 1..2: mod_base = OTHER; note = phosphorothioate internucleotide linkage
  modified_base 2..3: mod_base = OTHER; note = phosphorothioate internucleotide linkage
  modified_base 22..23: mod_base = OTHER; note = phosphorothioate internucleotide linkage
  modified_base 23..24: mod_base = OTHER; note = phosphorothioate internucleotide linkage
tcgtataacaataaggggctgcctat

SEQ ID NO: 660 - RNA, 26 nt, synthetic construct
  source 1..26: mol_type = other RNA
  modified_base 1: mod_base = OTHER; note = 2'-OMe modified nucleotide
  modified_base 3: mod_base = OTHER; note = 2'-OMe modified nucleotide
  modified_base 5: mod_base = OTHER; note = 2'-OMe modified nucleotide
  modified_base 7: mod_base = OTHER; note = 2'-OMe modified nucleotide
  modified_base 9..13: mod_base = OTHER; note = 2'-OMe modified nucleotide
  modified_base 15..24: mod_base = OTHER; note = 2'-OMe modified nucleotide
  modified_base 26: mod_base = OTHER; note = 2'-OMe modified nucleotide
  modified_base 2: mod_base = OTHER; note = 2-deoxy-2-fluoro ribonucleotide
  modified_base 4: mod_base = OTHER; note = 2-deoxy-2-fluoro ribonucleotide
  modified_base 6: mod_base = OTHER; note = 2-deoxy-2-fluoro ribonucleotide
  modified_base 8: mod_base = OTHER; note = 2-deoxy-2-fluoro ribonucleotide
  modified_base 14: mod_base = OTHER; note = 2-deoxy-2-fluoro ribonucleotide
  modified_base 1..2: mod_base = OTHER; note = phosphorothioate internucleotide linkage
  modified_base 2..3: mod_base = OTHER; note = phosphorothioate internucleotide linkage
  modified_base 22..23: mod_base = OTHER; note = phosphorothioate internucleotide linkage
  modified_base 23..24: mod_base = OTHER; note = phosphorothioate internucleotide linkage
tcgtataacaataaggggctgcctat

SEQ ID NO: 661 - RNA, 26 nt, synthetic construct
  source 1..26: mol_type = other RNA
  modified_base 1: mod_base = OTHER; note = 2'-OMe modified nucleotide
  modified_base 3: mod_base = OTHER; note = 2'-OMe modified nucleotide
  modified_base 5: mod_base = OTHER; note = 2'-OMe modified nucleotide
  modified_base 7..8: mod_base = OTHER; note = 2'-OMe modified nucleotide
  modified_base 10..13: mod_base = OTHER; note = 2'-OMe modified nucleotide
  modified_base 15..24: mod_base = OTHER; note = 2'-OMe modified nucleotide
  modified_base 26: mod_base = OTHER; note = 2'-OMe modified nucleotide
  modified_base 2: mod_base = OTHER; note = 2-deoxy-2-fluoro ribonucleotide
  modified_base 4: mod_base = OTHER; note = 2-deoxy-2-fluoro ribonucleotide
  modified_base 6: mod_base = OTHER; note = 2-deoxy-2-fluoro ribonucleotide
  modified_base 9: mod_base = OTHER; note = 2-deoxy-2-fluoro ribonucleotide
  modified_base 14: mod_base = OTHER; note = 2-deoxy-2-fluoro ribonucleotide
  modified_base 1..2: mod_base = OTHER; note = phosphorothioate internucleotide linkage
  modified_base 2..3: mod_base = OTHER; note = phosphorothioate internucleotide linkage
  modified_base 22..23: mod_base = OTHER; note = phosphorothioate internucleotide linkage
  modified_base 23..24: mod_base = OTHER; note = phosphorothioate internucleotide linkage
tcgtataacaataaggggctgcctat

SEQ ID NO: 662 - RNA, 26 nt, synthetic construct
  source 1..26: mol_type = other RNA
  modified_base 1: mod_base = OTHER; note = 2'-OMe modified nucleotide
  modified_base 4..6: mod_base = OTHER; note = 2'-OMe modified nucleotide
  modified_base 8: mod_base = OTHER; note = 2'-OMe modified nucleotide
  modified_base 10..13: mod_base = OTHER; note = 2'-OMe modified nucleotide
  modified_base 15..24: mod_base = OTHER; note = 2'-OMe modified nucleotide
  modified_base 26: mod_base = OTHER; note = 2'-OMe modified nucleotide
  modified_base 2..3: mod_base = OTHER; note = 2-deoxy-2-fluoro ribonucleotide
  modified_base 7: mod_base = OTHER; note = 2-deoxy-2-fluoro ribonucleotide
  modified_base 9: mod_base = OTHER; note = 2-deoxy-2-fluoro ribonucleotide
  modified_base 14: mod_base = OTHER; note = 2-deoxy-2-fluoro ribonucleotide
  modified_base 1..2: mod_base = OTHER; note = phosphorothioate internucleotide linkage
  modified_base 2..3: mod_base = OTHER; note = phosphorothioate internucleotide linkage
  modified_base 22..23: mod_base = OTHER; note = phosphorothioate internucleotide linkage
  modified_base 23..24: mod_base = OTHER; note = phosphorothioate internucleotide linkage
tcgtataacaataaggggctgcctat

SEQ ID NO: 663 - RNA, 26 nt, synthetic construct
  source 1..26: mol_type = other RNA
  modified_base 1: mod_base = OTHER; note = 2'-OMe modified nucleotide
  modified_base 3: mod_base = OTHER; note = 2'-OMe modified nucleotide
  modified_base 5: mod_base = OTHER; note = 2'-OMe modified nucleotide
  modified_base 7: mod_base = OTHER; note = 2'-OMe modified nucleotide
  modified_base 9: mod_base = OTHER; note = 2'-OMe modified nucleotide
  modified_base 11..13: mod_base = OTHER; note = 2'-OMe modified nucleotide
  modified_base 15..24: mod_base = OTHER; note = 2'-OMe modified nucleotide
  modified_base 26: mod_base = OTHER; note = 2'-OMe modified nucleotide
  modified_base 2: mod_base = OTHER; note = 2-deoxy-2-fluoro ribonucleotide
  modified_base 4: mod_base = OTHER; note = 2-deoxy-2-fluoro ribonucleotide
  modified_base 6: mod_base = OTHER; note = 2-deoxy-2-fluoro ribonucleotide
  modified_base 8: mod_base = OTHER; note = 2-deoxy-2-fluoro ribonucleotide
  modified_base 10: mod_base = OTHER; note = 2-deoxy-2-fluoro ribonucleotide
  modified_base 14: mod_base = OTHER; note = 2-deoxy-2-fluoro ribonucleotide
  modified_base 1..2: mod_base = OTHER; note = phosphorothioate internucleotide linkage
  modified_base 2..3: mod_base = OTHER; note = phosphorothioate internucleotide linkage
  modified_base 22..23: mod_base = OTHER; note = phosphorothioate internucleotide linkage
  modified_base 23..24: mod_base = OTHER; note = phosphorothioate internucleotide linkage
tgagaatgagcctcgataactcttat

SEQ ID NO: 664 - RNA, 26 nt, synthetic construct
  source 1..26: mol_type = other RNA
  modified_base 1: mod_base = OTHER; note = 2'-OMe modified nucleotide
  modified_base 4..5: mod_base = OTHER; note = 2'-OMe modified nucleotide
  modified_base 7: mod_base = OTHER; note = 2'-OMe modified nucleotide
  modified_base 9: mod_base = OTHER; note = 2'-OMe modified nucleotide
  modified_base 11..13: mod_base = OTHER; note = 2'-OMe modified nucleotide
  modified_base 15..24: mod_base = OTHER; note = 2'-OMe modified nucleotide
  modified_base 26: mod_base = OTHER; note = 2'-OMe modified nucleotide
  modified_base 2..3: mod_base = OTHER; note = 2-deoxy-2-fluoro ribonucleotide
  modified_base 6: mod_base = OTHER; note = 2-deoxy-2-fluoro ribonucleotide
  modified_base 8: mod_base = OTHER; note = 2-deoxy-2-fluoro ribonucleotide
  modified_base 10: mod_base = OTHER; note = 2-deoxy-2-fluoro ribonucleotide
  modified_base 14: mod_base = OTHER; note = 2-deoxy-2-fluoro ribonucleotide
  modified_base 1..2: mod_base = OTHER; note = phosphorothioate internucleotide linkage
  modified_base 2..3: mod_base = OTHER; note = phosphorothioate internucleotide linkage
  modified_base 22..23: mod_base = OTHER; note = phosphorothioate internucleotide linkage
  modified_base 23..24: mod_base = OTHER; note = phosphorothioate internucleotide linkage
tgagaatgagcctcgataactcttat

SEQ ID NO: 665 - RNA, 26 nt, synthetic construct
  source 1..26: mol_type = other RNA
  modified_base 1: mod_base = OTHER; note = 2'-OMe modified nucleotide
  modified_base 4: mod_base = OTHER; note = 2'-OMe modified nucleotide
  modified_base 6..7: mod_base = OTHER; note = 2'-OMe modified nucleotide
  modified_base 9: mod_base = OTHER; note = 2'-OMe modified nucleotide
  modified_base 11: mod_base = OTHER; note = 2'-OMe modified nucleotide
  modified_base 13: mod_base = OTHER; note = 2'-OMe modified nucleotide
  modified_base 15..24: mod_base = OTHER; note = 2'-OMe modified nucleotide
  modified_base 26: mod_base = OTHER; note = 2'-OMe modified nucleotide
  modified_base 2..3: mod_base = OTHER; note = 2-deoxy-2-fluoro ribonucleotide
  modified_base 5: mod_base = OTHER; note = 2-deoxy-2-fluoro ribonucleotide
  modified_base 8: mod_base = OTHER; note = 2-deoxy-2-fluoro ribonucleotide
  modified_base 10: mod_base = OTHER; note = 2-deoxy-2-fluoro ribonucleotide
  modified_base 12: mod_base = OTHER; note = 2-deoxy-2-fluoro ribonucleotide
  modified_base 14: mod_base = OTHER; note = 2-deoxy-2-fluoro ribonucleotide
  modified_base 1..2: mod_base = OTHER; note = phosphorothioate internucleotide linkage
  modified_base 2..3: mod_base = OTHER; note = phosphorothioate internucleotide linkage
  modified_base 22..23: mod_base = OTHER; note = phosphorothioate internucleotide linkage
  modified_base 23..24: mod_base = OTHER; note = phosphorothioate internucleotide linkage
tgagaatgagcctcgataactcttat

SEQ ID NO: 666 - RNA, 26 nt, synthetic construct
  source 1..26: mol_type = other RNA
  modified_base 1: mod_base = OTHER; note = 2'-OMe modified nucleotide
  modified_base 4: mod_base = OTHER; note = 2'-OMe modified nucleotide
  modified_base 6..7: mod_base = OTHER; note = 2'-OMe modified nucleotide
  modified_base 9..10: mod_base = OTHER; note = 2'-OMe modified nucleotide
  modified_base 13: mod_base = OTHER; note = 2'-OMe modified nucleotide
  modified_base 15..24: mod_base = OTHER; note = 2'-OMe modified nucleotide
  modified_base 26: mod_base = OTHER; note = 2'-OMe modified nucleotide
  modified_base 2..3: mod_base = OTHER; note = 2-deoxy-2-fluoro ribonucleotide
  modified_base 5: mod_base = OTHER; note = 2-deoxy-2-fluoro ribonucleotide
  modified_base 8: mod_base = OTHER; note = 2-deoxy-2-fluoro ribonucleotide
  modified_base 11..12: mod_base = OTHER; note = 2-deoxy-2-fluoro ribonucleotide
  modified_base 14: mod_base = OTHER; note = 2-deoxy-2-fluoro ribonucleotide
  modified_base 1..2: mod_base = OTHER; note = phosphorothioate internucleotide linkage
  modified_base 2..3: mod_base = OTHER; note = phosphorothioate internucleotide linkage
  modified_base 22..23: mod_base = OTHER; note = phosphorothioate internucleotide linkage
  modified_base 23..24: mod_base = OTHER; note = phosphorothioate internucleotide linkage
tgagaatgagcctcgataactcttat

SEQ ID NO: 667 - RNA, 26 nt, synthetic construct
  source 1..26: mol_type = other RNA
  modified_base 1: mod_base = OTHER; note = 2'-OMe modified nucleotide
  modified_base 3: mod_base = OTHER; note = 2'-OMe modified nucleotide
  modified_base 5: mod_base = OTHER; note = 2'-OMe modified nucleotide
  modified_base 7: mod_base = OTHER; note = 2'-OMe modified nucleotide
  modified_base 9..13: mod_base = OTHER; note = 2'-OMe modified nucleotide
  modified_base 15..24: mod_base = OTHER; note = 2'-OMe modified nucleotide
  modified_base 26: mod_base = OTHER; note = 2'-OMe modified nucleotide
  modified_base 2: mod_base = OTHER; note = 2-deoxy-2-fluoro ribonucleotide
  modified_base 4: mod_base = OTHER; note = 2-deoxy-2-fluoro ribonucleotide
  modified_base 6: mod_base = OTHER; note = 2-deoxy-2-fluoro ribonucleotide
  modified_base 8: mod_base = OTHER; note = 2-deoxy-2-fluoro ribonucleotide
  modified_base 14: mod_base = OTHER; note = 2-deoxy-2-fluoro ribonucleotide
  modified_base 1..2: mod_base = OTHER; note = phosphorothioate internucleotide linkage
  modified_base 2..3: mod_base = OTHER; note = phosphorothioate internucleotide linkage
  modified_base 22..23: mod_base = OTHER; note = phosphorothioate internucleotide linkage
  modified_base 23..24: mod_base = OTHER; note = phosphorothioate internucleotide linkage
tgagaatgagcctcgataactcttat

SEQ ID NO: 668 - RNA, 17 nt, synthetic construct
  source 1..17: mol_type = other RNA
  modified_base 1: mod_base = OTHER; note = 2'-OMe modified nucleotide
  modified_base 3..7: mod_base = OTHER; note = 2'-OMe modified nucleotide
  modified_base 9: mod_base = OTHER; note = 2'-OMe modified nucleotide
  modified_base 11..13: mod_base = OTHER; note = 2'-OMe modified nucleotide
  modified_base 15..17: mod_base = OTHER; note = 2'-OMe modified nucleotide
  modified_base 2: mod_base = OTHER; note = 2-deoxy-2-fluoro ribonucleotide
  modified_base 8: mod_base = OTHER; note = 2-deoxy-2-fluoro ribonucleotide
  modified_base 10: mod_base = OTHER; note = 2-deoxy-2-fluoro ribonucleotide
  modified_base 14: mod_base = OTHER; note = 2-deoxy-2-fluoro ribonucleotide
  modified_base 1..2: mod_base = OTHER; note = phosphorothioate internucleotide linkage
  modified_base 2..3: mod_base = OTHER; note = phosphorothioate internucleotide linkage
tgtataacaataagggg

SEQ ID NO: 669 - RNA, 17 nt, synthetic construct
  source 1..17: mol_type = other RNA
  modified_base 16..17: mod_base = OTHER; note = 2'-methoxyethyl nucleotide
  modified_base 1: mod_base = OTHER; note = 2'-OMe modified nucleotide
  modified_base 3: mod_base = OTHER; note = 2'-OMe modified nucleotide
  modified_base 5: mod_base = OTHER; note = 2'-OMe modified nucleotide
  modified_base 7: mod_base = OTHER; note = 2'-OMe modified nucleotide
  modified_base 9: mod_base = OTHER; note = 2'-OMe modified nucleotide
  modified_base 11: mod_base = OTHER; note = 2'-OMe modified nucleotide
  modified_base 13: mod_base = OTHER; note = 2'-OMe modified nucleotide
  modified_base 15: mod_base = OTHER; note = 2'-OMe modified nucleotide
  modified_base 2: mod_base = OTHER; note = 2-deoxy-2-fluoro ribonucleotide
  modified_base 4: mod_base = OTHER; note = 2-deoxy-2-fluoro ribonucleotide
  modified_base 6: mod_base = OTHER; note = 2-deoxy-2-fluoro ribonucleotide
  modified_base 8: mod_base = OTHER; note = 2-deoxy-2-fluoro ribonucleotide
  modified_base 10: mod_base = OTHER; note = 2-deoxy-2-fluoro ribonucleotide
  modified_base 12: mod_base = OTHER; note = 2-deoxy-2-fluoro ribonucleotide
  modified_base 14: mod_base = OTHER; note = 2-deoxy-2-fluoro ribonucleotide
  modified_base 1..2: mod_base = OTHER; note = phosphorothioate internucleotide linkage
  modified_base 2..3: mod_base = OTHER; note = phosphorothioate internucleotide linkage
tgtataacaataagggg

SEQ ID NO: 670 - RNA, 17 nt, synthetic construct
  source 1..17: mol_type = other RNA
  modified_base 1: mod_base = OTHER; note = 2'-OMe modified nucleotide
  modified_base 3..7: mod_base = OTHER; note = 2'-OMe modified nucleotide
  modified_base 9: mod_base = OTHER; note = 2'-OMe modified nucleotide
  modified_base 11..13: mod_base = OTHER; note = 2'-OMe modified nucleotide
  modified_base 15..17: mod_base = OTHER; note = 2'-OMe modified nucleotide
  modified_base 2: mod_base = OTHER; note = 2-deoxy-2-fluoro ribonucleotide
  modified_base 8: mod_base = OTHER; note = 2-deoxy-2-fluoro ribonucleotide
  modified_base 10: mod_base = OTHER; note = 2-deoxy-2-fluoro ribonucleotide
  modified_base 14: mod_base = OTHER; note = 2-deoxy-2-fluoro ribonucleotide
  modified_base 1..2: mod_base = OTHER; note = phosphorothioate internucleotide linkage
  modified_base 2..3: mod_base = OTHER; note = phosphorothioate internucleotide linkage
tcgtataacaataaggg

SEQ ID NO: 671 - RNA, 17 nt, synthetic construct
  source 1..17: mol_type = other RNA
  modified_base 16..17: mod_base = OTHER; note = 2'-methoxyethyl nucleotide
  modified_base 1: mod_base = OTHER; note = 2'-OMe modified nucleotide
  modified_base 3: mod_base = OTHER; note = 2'-OMe modified nucleotide
  modified_base 5: mod_base = OTHER; note = 2'-OMe modified nucleotide
  modified_base 7: mod_base = OTHER; note = 2'-OMe modified nucleotide
  modified_base 9: mod_base = OTHER; note = 2'-OMe modified nucleotide
  modified_base 11: mod_base = OTHER; note = 2'-OMe modified nucleotide
  modified_base 13: mod_base = OTHER; note = 2'-OMe modified nucleotide
  modified_base 15: mod_base = OTHER; note = 2'-OMe modified nucleotide
  modified_base 2: mod_base = OTHER; note = 2-deoxy-2-fluoro ribonucleotide
  modified_base 4: mod_base = OTHER; note = 2-deoxy-2-fluoro ribonucleotide
  modified_base 6: mod_base = OTHER; note = 2-deoxy-2-fluoro ribonucleotide
  modified_base 8: mod_base = OTHER; note = 2-deoxy-2-fluoro ribonucleotide
  modified_base 10: mod_base = OTHER; note = 2-deoxy-2-fluoro ribonucleotide
  modified_base 12: mod_base = OTHER; note = 2-deoxy-2-fluoro ribonucleotide
  modified_base 14: mod_base = OTHER; note = 2-deoxy-2-fluoro ribonucleotide
  modified_base 1..2: mod_base = OTHER; note = phosphorothioate internucleotide linkage
  modified_base 2..3: mod_base = OTHER; note = phosphorothioate internucleotide linkage
tcgtataacaataaggg

SEQ ID NO: 672 - RNA, 17 nt, synthetic construct
  source 1..17: mol_type = other RNA
  modified_base 1: mod_base = OTHER; note = 2'-OMe modified nucleotide
  modified_base 3..7: mod_base = OTHER; note = 2'-OMe modified nucleotide
  modified_base 9: mod_base = OTHER; note = 2'-OMe modified nucleotide
  modified_base 11..13: mod_base = OTHER; note = 2'-OMe modified nucleotide
  modified_base 15..17: mod_base = OTHER; note = 2'-OMe modified nucleotide
  modified_base 2: mod_base = OTHER; note = 2-deoxy-2-fluoro ribonucleotide
  modified_base 8: mod_base = OTHER; note = 2-deoxy-2-fluoro ribonucleotide
  modified_base 10: mod_base = OTHER; note = 2-deoxy-2-fluoro ribonucleotide
  modified_base 14: mod_base = OTHER; note = 2-deoxy-2-fluoro ribonucleotide
  modified_base 1..2: mod_base = OTHER; note = phosphorothioate internucleotide linkage
  modified_base 2..3: mod_base = OTHER; note = phosphorothioate internucleotide linkage
tgagaatgagcctcgat

SEQ ID NO: 673 - RNA, 17 nt, synthetic construct
  source 1..17: mol_type = other RNA
  modified_base 1: mod_base = OTHER; note = 2'-OMe modified nucleotide
  modified_base 3..11: mod_base = OTHER; note = 2'-OMe modified nucleotide
  modified_base 13: mod_base = OTHER; note = 2'-OMe modified nucleotide
  modified_base 15..17: mod_base = OTHER; note = 2'-OMe modified nucleotide
  modified_base 2: mod_base = OTHER; note = 2-deoxy-2-fluoro ribonucleotide
  modified_base 12: mod_base = OTHER; note = 2-deoxy-2-fluoro ribonucleotide
  modified_base 14: mod_base = OTHER; note = 2-deoxy-2-fluoro ribonucleotide
  modified_base 1..2: mod_base = OTHER; note = phosphorothioate internucleotide linkage
  modified_base 2..3: mod_base = OTHER; note = phosphorothioate internucleotide linkage
tgagaatgagcctcgat

SEQ ID NO: 674 - RNA, 17 nt, synthetic construct
  source 1..17: mol_type = other RNA
  modified_base 16..17: mod_base = OTHER; note = 2'-methoxyethyl nucleotide
  modified_base 1: mod_base = OTHER; note = 2'-OMe modified nucleotide
  modified_base 3: mod_base = OTHER; note = 2'-OMe modified nucleotide
  modified_base 5: mod_base = OTHER; note = 2'-OMe modified nucleotide
  modified_base 7: mod_base = OTHER; note = 2'-OMe modified nucleotide
  modified_base 9: mod_base = OTHER; note = 2'-OMe modified nucleotide
  modified_base 11: mod_base = OTHER; note = 2'-OMe modified nucleotide
  modified_base 13: mod_base = OTHER; note = 2'-OMe modified nucleotide
  modified_base 15: mod_base = OTHER; note = 2'-OMe modified nucleotide
  modified_base 2: mod_base = OTHER; note = 2-deoxy-2-fluoro ribonucleotide
  modified_base 4: mod_base = OTHER; note = 2-deoxy-2-fluoro ribonucleotide
  modified_base 6: mod_base = OTHER; note = 2-deoxy-2-fluoro ribonucleotide
  modified_base 8: mod_base = OTHER; note = 2-deoxy-2-fluoro ribonucleotide
  modified_base 10: mod_base = OTHER; note = 2-deoxy-2-fluoro ribonucleotide
  modified_base 12: mod_base = OTHER; note = 2-deoxy-2-fluoro ribonucleotide
  modified_base 14: mod_base = OTHER; note = 2-deoxy-2-fluoro ribonucleotide
  modified_base 1..2: mod_base = OTHER; note = phosphorothioate internucleotide linkage
  modified_base 2..3: mod_base = OTHER; note = phosphorothioate internucleotide linkage
  modified_base 17: mod_base = OTHER; note = Thymine
tgagaatgagcctcgat

SEQ ID NO: 675 - RNA, 17 nt, synthetic construct
  source 1..17: mol_type = other RNA
  modified_base 1: mod_base = OTHER; note = 2'-OMe modified nucleotide
  modified_base 3..7: mod_base = OTHER; note = 2'-OMe modified nucleotide
  modified_base 9: mod_base = OTHER; note = 2'-OMe modified nucleotide
  modified_base 11..13: mod_base = OTHER; note = 2'-OMe modified nucleotide
  modified_base 15..17: mod_base = OTHER; note = 2'-OMe modified nucleotide
  modified_base 2: mod_base = OTHER; note = 2-deoxy-2-fluoro ribonucleotide
  modified_base 8: mod_base = OTHER; note = 2-deoxy-2-fluoro ribonucleotide
  modified_base 10: mod_base = OTHER; note = 2-deoxy-2-fluoro ribonucleotide
  modified_base 14: mod_base = OTHER; note = 2-deoxy-2-fluoro ribonucleotide
  modified_base 1..2: mod_base = OTHER; note = phosphorothioate internucleotide linkage
  modified_base 2..3: mod_base = OTHER; note = phosphorothioate internucleotide linkage
tgacacctgattctgtt

SEQ ID NO: 676 - RNA, 17 nt, synthetic construct
  source 1..17: mol_type = other RNA
  modified_base 1: mod_base = OTHER; note = 2'-OMe modified nucleotide
  modified_base 3: mod_base = OTHER; note = 2'-OMe modified nucleotide
  modified_base 5: mod_base = OTHER; note = 2'-OMe modified nucleotide
  modified_base 7..13: mod_base = OTHER; note = 2'-OMe modified nucleotide
  modified_base 15..17: mod_base = OTHER; note = 2'-OMe modified nucleotide
  modified_base 2: mod_base = OTHER; note = 2-deoxy-2-fluoro ribonucleotide
  modified_base 4: mod_base = OTHER; note = 2-deoxy-2-fluoro ribonucleotide
  modified_base 6: mod_base = OTHER; note = 2-deoxy-2-fluoro ribonucleotide
  modified_base 14: mod_base = OTHER; note = 2-deoxy-2-fluoro ribonucleotide
  modified_base 1..2: mod_base = OTHER; note = phosphorothioate internucleotide linkage
  modified_base 2..3: mod_base = OTHER; note = phosphorothioate internucleotide linkage
tgacacctgattctgtt

SEQ ID NO: 677 - RNA, 17 nt, synthetic construct
  source 1..17: mol_type = other RNA
  modified_base 16..17: mod_base = OTHER; note = 2'-methoxyethyl nucleotide
  modified_base 1: mod_base = OTHER; note = 2'-OMe modified nucleotide
  modified_base 3: mod_base = OTHER; note = 2'-OMe modified nucleotide
  modified_base 5: mod_base = OTHER; note = 2'-OMe modified nucleotide
  modified_base 7: mod_base = OTHER; note = 2'-OMe modified nucleotide
  modified_base 9: mod_base = OTHER; note = 2'-OMe modified nucleotide
  modified_base 11: mod_base = OTHER; note = 2'-OMe modified nucleotide
  modified_base 13: mod_base = OTHER; note = 2'-OMe modified nucleotide
  modified_base 15: mod_base = OTHER; note = 2'-OMe modified nucleotide
  modified_base 2: mod_base = OTHER; note = 2-deoxy-2-fluoro ribonucleotide
  modified_base 4: mod_base = OTHER; note = 2-deoxy-2-fluoro ribonucleotide
  modified_base 6: mod_base = OTHER; note = 2-deoxy-2-fluoro ribonucleotide
  modified_base 8: mod_base = OTHER; note = 2-deoxy-2-fluoro ribonucleotide
  modified_base 10: mod_base = OTHER; note = 2-deoxy-2-fluoro ribonucleotide
  modified_base 12: mod_base = OTHER; note = 2-deoxy-2-fluoro ribonucleotide
  modified_base 14: mod_base = OTHER; note = 2-deoxy-2-fluoro ribonucleotide
  modified_base 1..2: mod_base = OTHER; note = phosphorothioate internucleotide linkage
  modified_base 2..3: mod_base = OTHER; note = phosphorothioate internucleotide linkage
  modified_base 16..17: mod_base = OTHER; note = Thymine
tgacacctgattctgtt

SEQ ID NO: 678 - RNA, 26 nt, synthetic construct
  source 1..26: mol_type = other RNA
  modified_base 2: mod_base = OTHER; note = 2'-F-Arabino nucleotide
  modified_base 1: mod_base = OTHER; note = 2'-OMe modified nucleotide
  modified_base 3: mod_base = OTHER; note = 2'-OMe modified nucleotide
  modified_base 5: mod_base = OTHER; note = 2'-OMe modified nucleotide
  modified_base 7: mod_base = OTHER; note = 2'-OMe modified nucleotide
  modified_base 11: mod_base = OTHER; note = 2'-OMe modified nucleotide
  modified_base 12: mod_base = OTHER; note = 2'-OMe modified nucleotide
  modified_base 13: mod_base = OTHER; note = 2'-OMe modified nucleotide
  modified_base 15: mod_base = OTHER; note = 2'-OMe modified nucleotide
  modified_base 17: mod_base = OTHER; note = 2'-OMe modified nucleotide
  modified_base 19: mod_base = OTHER; note = 2'-OMe modified nucleotide
  modified_base 21..24: mod_base = OTHER; note = 2'-OMe modified nucleotide
  modified_base 26: mod_base = OTHER; note = 2'-OMe modified nucleotide
  modified_base 4: mod_base = OTHER; note = 2-deoxy-2-fluoro ribonucleotide
  modified_base 6: mod_base = OTHER; note = 2-deoxy-2-fluoro ribonucleotide
  modified_base 8..10: mod_base = OTHER; note = 2-deoxy-2-fluoro ribonucleotide
  modified_base 14: mod_base = OTHER; note = 2-deoxy-2-fluoro ribonucleotide
  modified_base 16: mod_base = OTHER; note = 2-deoxy-2-fluoro ribonucleotide
  modified_base 18: mod_base = OTHER; note = 2-deoxy-2-fluoro ribonucleotide
  modified_base 20: mod_base = OTHER; note = 2-deoxy-2-fluoro ribonucleotide
  modified_base 1..2: mod_base = OTHER; note = phosphorothioate internucleotide linkage
  modified_base 2..3: mod_base = OTHER; note = phosphorothioate internucleotide linkage
  modified_base 22..23: mod_base = OTHER; note = phosphorothioate internucleotide linkage
  modified_base 23..24: mod_base = OTHER; note = phosphorothioate internucleotide linkage
tcgtataacaataaggggctgcctat

SEQ ID NO: 679 - RNA, 26 nt, synthetic construct
  source 1..26: mol_type = other RNA
  modified_base 4: mod_base = OTHER; note = 2'-F-Arabino nucleotide
  modified_base 1: mod_base = OTHER; note = 2'-OMe modified nucleotide
  modified_base 3: mod_base = OTHER; note = 2'-OMe modified nucleotide
  modified_base 5: mod_base = OTHER; note = 2'-OMe modified nucleotide
  modified_base 7: mod_base = OTHER; note = 2'-OMe modified nucleotide
  modified_base 11: mod_base = OTHER; note = 2'-OMe modified nucleotide
  modified_base 12: mod_base = OTHER; note = 2'-OMe modified nucleotide
  modified_base 13: mod_base = OTHER; note = 2'-OMe modified nucleotide
  modified_base 15: mod_base = OTHER; note = 2'-OMe modified nucleotide
  modified_base 17: mod_base = OTHER; note = 2'-OMe modified nucleotide
  modified_base 19: mod_base = OTHER; note = 2'-OMe modified nucleotide
  modified_base 21..24: mod_base = OTHER; note = 2'-OMe modified nucleotide
  modified_base 26: mod_base = OTHER; note = 2'-OMe modified nucleotide
  modified_base 2: mod_base = OTHER; note = 2-deoxy-2-fluoro ribonucleotide
  modified_base 6: mod_base = OTHER; note = 2-deoxy-2-fluoro ribonucleotide
  modified_base 8..10: mod_base = OTHER; note = 2-deoxy-2-fluoro ribonucleotide
  modified_base 14: mod_base = OTHER; note = 2-deoxy-2-fluoro ribonucleotide
  modified_base 16: mod_base = OTHER; note = 2-deoxy-2-fluoro ribonucleotide
  modified_base 18: mod_base = OTHER; note = 2-deoxy-2-fluoro ribonucleotide
  modified_base 20: mod_base = OTHER; note = 2-deoxy-2-fluoro ribonucleotide
  modified_base 1..2: mod_base = OTHER; note = phosphorothioate internucleotide linkage
  modified_base 2..3: mod_base = OTHER; note = phosphorothioate internucleotide linkage
  modified_base 22..23: mod_base = OTHER; note = phosphorothioate internucleotide linkage
  modified_base 23..24: mod_base = OTHER; note = phosphorothioate internucleotide linkage
tcgtataacaataaggggctgcctat

SEQ ID NO: 680 - RNA, 26 nt, synthetic construct
  source 1..26: mol_type = other RNA
  modified_base 6: mod_base = OTHER; note = 2'-F-Arabino nucleotide
  modified_base 1: mod_base = OTHER; note = 2'-OMe modified nucleotide
  modified_base 3: mod_base = OTHER; note = 2'-OMe modified nucleotide
  modified_base 5: mod_base = OTHER; note = 2'-OMe modified nucleotide
  modified_base 7: mod_base = OTHER; note = 2'-OMe modified nucleotide
  modified_base 11: mod_base = OTHER; note = 2'-OMe modified nucleotide
  modified_base 12: mod_base = OTHER; note = 2'-OMe modified nucleotide
  modified_base 13: mod_base = OTHER; note = 2'-OMe modified nucleotide
  modified_base 15: mod_base = OTHER; note = 2'-OMe modified nucleotide
  modified_base 17: mod_base = OTHER; note = 2'-OMe modified nucleotide
  modified_base 19: mod_base = OTHER; note = 2'-OMe modified nucleotide
  modified_base 21..24: mod_base = OTHER; note = 2'-OMe modified nucleotide
  modified_base 26: mod_base = OTHER; note = 2'-OMe modified nucleotide
  modified_base 2: mod_base = OTHER; note = 2-deoxy-2-fluoro ribonucleotide
  modified_base 4: mod_base = OTHER; note = 2-deoxy-2-fluoro ribonucleotide
  modified_base 8..10: mod_base = OTHER; note = 2-deoxy-2-fluoro ribonucleotide
  modified_base 14: mod_base = OTHER; note = 2-deoxy-2-fluoro ribonucleotide
  modified_base 16: mod_base = OTHER; note = 2-deoxy-2-fluoro ribonucleotide
  modified_base 18: mod_base = OTHER; note = 2-deoxy-2-fluoro ribonucleotide
  modified_base 20: mod_base = OTHER; note = 2-deoxy-2-fluoro ribonucleotide
  modified_base 1..2: mod_base = OTHER; note = phosphorothioate internucleotide linkage
  modified_base 2..3: mod_base = OTHER; note = phosphorothioate internucleotide linkage
  modified_base 22..23: mod_base = OTHER; note = phosphorothioate internucleotide linkage
  modified_base 23..24: mod_base = OTHER; note = phosphorothioate internucleotide linkage
tcgtataacaataaggggctgcctat

SEQ ID NO: 681 - RNA, 26 nt, synthetic construct
  source 1..26: mol_type = other RNA
  modified_base 8: mod_base = OTHER; note = 2'-F-Arabino nucleotide
  modified_base 1: mod_base = OTHER; note = 2'-OMe modified nucleotide
  modified_base 3: mod_base = OTHER; note = 2'-OMe modified nucleotide
  modified_base 5: mod_base = OTHER; note = 2'-OMe modified nucleotide
  modified_base 7: mod_base = OTHER; note = 2'-OMe modified nucleotide
  modified_base 11: mod_base = OTHER; note = 2'-OMe modified nucleotide
  modified_base 12: mod_base = OTHER; note = 2'-OMe modified nucleotide
  modified_base 13: mod_base = OTHER; note = 2'-OMe modified nucleotide
  modified_base 15: mod_base = OTHER; note = 2'-OMe modified nucleotide
  modified_base 17: mod_base = OTHER; note = 2'-OMe modified nucleotide
  modified_base 19: mod_base = OTHER; note = 2'-OMe modified nucleotide
  modified_base 21..24: mod_base = OTHER; note = 2'-OMe modified nucleotide
  modified_base 26: mod_base = OTHER; note = 2'-OMe modified nucleotide
  modified_base 2: mod_base = OTHER; note = 2-deoxy-2-fluoro ribonucleotide
  modified_base 4: mod_base = OTHER; note = 2-deoxy-2-fluoro ribonucleotide
  modified_base 6: mod_base = OTHER; note = 2-deoxy-2-fluoro ribonucleotide
  modified_base 9..10: mod_base = OTHER; note = 2-deoxy-2-fluoro ribonucleotide
  modified_base 14: mod_base = OTHER; note = 2-deoxy-2-fluoro ribonucleotide
  modified_base 16: mod_base = OTHER; note = 2-deoxy-2-fluoro ribonucleotide
  modified_base 18: mod_base = OTHER; note = 2-deoxy-2-fluoro ribonucleotide
  modified_base 20: mod_base = OTHER; note = 2-deoxy-2-fluoro ribonucleotide
  modified_base 1..2: mod_base = OTHER; note = phosphorothioate internucleotide linkage
  modified_base 2..3: mod_base = OTHER; note = phosphorothioate internucleotide linkage
  modified_base 22..23: mod_base = OTHER; note = phosphorothioate internucleotide linkage
  modified_base 23..24: mod_base = OTHER; note = phosphorothioate internucleotide linkage
tcgtataacaataaggggctgcctat

SEQ ID NO: 682 - RNA, 26 nt, synthetic construct
  source 1..26: mol_type = other RNA
  modified_base 2: mod_base = OTHER; note = 2'-F-Arabino nucleotide
  modified_base 1: mod_base = OTHER; note = 2'-OMe modified nucleotide
  modified_base 3..7: mod_base = OTHER; note = 2'-OMe modified nucleotide
  modified_base 9: mod_base = OTHER; note = 2'-OMe modified nucleotide
  modified_base 11..13: mod_base = OTHER; note = 2'-OMe modified nucleotide
  modified_base 15..24: mod_base = OTHER; note = 2'-OMe modified nucleotide
  modified_base 26: mod_base = OTHER; note = 2'-OMe modified nucleotide
  modified_base 8: mod_base = OTHER; note = 2-deoxy-2-fluoro ribonucleotide
  modified_base 10: mod_base = OTHER; note = 2-deoxy-2-fluoro ribonucleotide
  modified_base 14: mod_base = OTHER; note = 2-deoxy-2-fluoro ribonucleotide
  modified_base 1..2: mod_base = OTHER; note = phosphorothioate internucleotide linkage
  modified_base 2..3: mod_base = OTHER; note = phosphorothioate internucleotide linkage
  modified_base 22..23: mod_base = OTHER; note = phosphorothioate internucleotide linkage
  modified_base 23..24: mod_base = OTHER; note = phosphorothioate internucleotide linkage
tgagaatgagcctcgataactcttat

SEQ ID NO: 683 - RNA, 26 nt, synthetic construct
  source 1..26: mol_type = other RNA
  modified_base 8: mod_base = OTHER; note = 2'-F-Arabino nucleotide
  modified_base 1: mod_base = OTHER; note = 2'-OMe modified nucleotide
  modified_base 3..7: mod_base = OTHER; note = 2'-OMe modified nucleotide
  modified_base 9: mod_base = OTHER; note = 2'-OMe modified nucleotide
  modified_base 11..13: mod_base = OTHER; note = 2'-OMe modified nucleotide
  modified_base 15..24: mod_base = OTHER; note = 2'-OMe modified nucleotide
  modified_base 26: mod_base = OTHER; note = 2'-OMe modified nucleotide
  modified_base 2: mod_base = OTHER; note = 2-deoxy-2-fluoro ribonucleotide
  modified_base 10: mod_base = OTHER; note = 2-deoxy-2-fluoro ribonucleotide
  modified_base 14: mod_base = OTHER; note = 2-deoxy-2-fluoro ribonucleotide
  modified_base 1..2: mod_base = OTHER; note = phosphorothioate internucleotide linkage
  modified_base 2..3: mod_base = OTHER; note = phosphorothioate internucleotide linkage
  modified_base 22..23: mod_base = OTHER; note = phosphorothioate internucleotide linkage
  modified_base 23..24: mod_base = OTHER; note = phosphorothioate internucleotide linkage
tgagaatgagcctcgataactcttat

SEQ ID NO: 684 - RNA, 26 nt, synthetic construct
  source 1..26: mol_type = other RNA
  modified_base 1: mod_base = OTHER; note = 2'-methoxyethyl nucleotide
  modified_base 3..7: mod_base = OTHER; note = 2'-OMe modified nucleotide
  modified_base 9: mod_base = OTHER; note = 2'-OMe modified nucleotide
  modified_base 11..13: mod_base = OTHER; note = 2'-OMe modified nucleotide
  modified_base 15..24: mod_base = OTHER; note = 2'-OMe modified nucleotide
  modified_base 26: mod_base = OTHER; note = 2'-OMe modified nucleotide
  modified_base 2: mod_base = OTHER; note = 2-deoxy-2-fluoro ribonucleotide
  modified_base 8: mod_base = OTHER; note = 2-deoxy-2-fluoro ribonucleotide
  modified_base 10: mod_base = OTHER; note = 2-deoxy-2-fluoro ribonucleotide
  modified_base 14: mod_base = OTHER; note = 2-deoxy-2-fluoro ribonucleotide
  modified_base 1..2: mod_base = OTHER; note = phosphorothioate internucleotide linkage
  modified_base 2..3: mod_base = OTHER; note = phosphorothioate internucleotide linkage
  modified_base 22..23: mod_base = OTHER; note = phosphorothioate internucleotide linkage
  modified_base 23..24: mod_base = OTHER; note = phosphorothioate internucleotide linkage
  modified_base 1: mod_base = OTHER; note = Thymine
tgagaatgagcctcgataactcttat

SEQ ID NO: 685 - RNA, 26 nt, synthetic construct
  source 1..26: mol_type = other RNA
  modified_base 1: mod_base = OTHER; note = 2'-methoxyethyl nucleotide
  modified_base 3: mod_base = OTHER; note = 2'-OMe modified nucleotide
  modified_base 5: mod_base = OTHER; note = 2'-OMe modified nucleotide
  modified_base 7: mod_base = OTHER; note = 2'-OMe modified nucleotide
  modified_base 11..13: mod_base = OTHER; note = 2'-OMe modified nucleotide
  modified_base 15: mod_base = OTHER; note = 2'-OMe modified nucleotide
  modified_base 17: mod_base = OTHER; note = 2'-OMe modified nucleotide
  modified_base 19: mod_base = OTHER; note = 2'-OMe modified nucleotide
  modified_base 21..24: mod_base = OTHER; note = 2'-OMe modified nucleotide
  modified_base 26: mod_base = OTHER; note = 2'-OMe modified nucleotide
  modified_base 2: mod_base = OTHER; note = 2-deoxy-2-fluoro ribonucleotide
  modified_base 4: mod_base = OTHER; note = 2-deoxy-2-fluoro ribonucleotide
  modified_base 6: mod_base = OTHER; note = 2-deoxy-2-fluoro ribonucleotide
  modified_base 8..10: mod_base = OTHER; note = 2-deoxy-2-fluoro ribonucleotide
  modified_base 14: mod_base = OTHER; note = 2-deoxy-2-fluoro ribonucleotide
  modified_base 16: mod_base = OTHER; note = 2-deoxy-2-fluoro ribonucleotide
  modified_base 18: mod_base = OTHER; note = 2-deoxy-2-fluoro ribonucleotide
  modified_base 20: mod_base = OTHER; note = 2-deoxy-2-fluoro ribonucleotide
  modified_base 1..2: mod_base = OTHER; note = phosphorothioate internucleotide linkage
  modified_base 2..3: mod_base = OTHER; note = phosphorothioate internucleotide linkage
  modified_base 22..23: mod_base = OTHER; note = phosphorothioate internucleotide linkage
  modified_base 23..24: mod_base = OTHER; note = phosphorothioate internucleotide linkage
  modified_base 1: mod_base = OTHER; note = Thymine
tcgtataacaataaggggctgcctat

SEQ ID NO: 686 - RNA, 26 nt, synthetic construct
  source 1..26: mol_type = other RNA
  modified_base 1: mod_base = OTHER; note = 2'-methoxyethyl nucleotide
  modified_base 3..13: mod_base = OTHER; note = 2'-OMe modified nucleotide
  modified_base 15..24: mod_base = OTHER; note = 2'-OMe modified nucleotide
  modified_base 26: mod_base = OTHER; note = 2'-OMe modified nucleotide
  modified_base 2: mod_base = OTHER; note = 2-deoxy-2-fluoro ribonucleotide
  modified_base 14: mod_base = OTHER; note = 2-deoxy-2-fluoro ribonucleotide
  modified_base 1..2: mod_base = OTHER; note = phosphorothioate internucleotide linkage
  modified_base 2..3: mod_base = OTHER; note = phosphorothioate internucleotide linkage
  modified_base 22..23: mod_base = OTHER; note = phosphorothioate internucleotide linkage
  modified_base 23..24: mod_base = OTHER; note = phosphorothioate internucleotide linkage
  modified_base 1: mod_base = OTHER; note = Thymine
tgagaatgagcctcgataactcttat

SEQ ID NO: 687 - RNA, 26 nt, synthetic construct
  source 1..26: mol_type = other RNA
  modified_base 1: mod_base = OTHER; note = 2'-OMe modified nucleotide
  modified_base 3: mod_base = OTHER; note = 2'-OMe modified nucleotide
  modified_base 5: mod_base = OTHER; note = 2'-OMe modified nucleotide
  modified_base 7..13: mod_base = OTHER; note = 2'-OMe modified nucleotide
  modified_base 15..24: mod_base = OTHER; note = 2'-OMe modified nucleotide
  modified_base 26: mod_base = OTHER; note = 2'-OMe modified nucleotide
  modified_base 2: mod_base = OTHER; note = 2-deoxy-2-fluoro ribonucleotide
  modified_base 4: mod_base = OTHER; note = 2-deoxy-2-fluoro ribonucleotide
  modified_base 6: mod_base = OTHER; note = 2-deoxy-2-fluoro ribonucleotide
  modified_base 14: mod_base = OTHER; note = 2-deoxy-2-fluoro ribonucleotide
  modified_base 1..2: mod_base = OTHER; note = phosphorothioate internucleotide linkage
  modified_base 2..3: mod_base = OTHER; note = phosphorothioate internucleotide linkage
  modified_base 22..23: mod_base = OTHER; note = phosphorothioate internucleotide linkage
  modified_base 23..24: mod_base = OTHER; note = phosphorothioate internucleotide linkage
tcgtataacaataaggggctgcctat

SEQ ID NO: 688 - RNA, 26 nt, synthetic construct
  source 1..26: mol_type = other RNA
  modified_base 1: mod_base = OTHER; note = 2'-OMe modified nucleotide
  modified_base 3: mod_base = OTHER; note = 2'-OMe modified nucleotide
  modified_base 5..7: mod_base = OTHER; note = 2'-OMe modified nucleotide
  modified_base 9..13: mod_base = OTHER; note = 2'-OMe modified nucleotide
  modified_base 15..24: mod_base = OTHER; note = 2'-OMe modified nucleotide
  modified_base 26: mod_base = OTHER; note = 2'-OMe modified nucleotide
  modified_base 2: mod_base = OTHER; note = 2-deoxy-2-fluoro ribonucleotide
  modified_base 4: mod_base = OTHER; note = 2-deoxy-2-fluoro ribonucleotide
  modified_base 8: mod_base = OTHER; note = 2-deoxy-2-fluoro ribonucleotide
  modified_base 14: mod_base = OTHER; note = 2-deoxy-2-fluoro ribonucleotide
  modified_base 1..2: mod_base = OTHER; note = phosphorothioate internucleotide linkage
  modified_base 2..3: mod_base = OTHER; note = phosphorothioate internucleotide linkage
  modified_base 22..23: mod_base = OTHER; note = phosphorothioate internucleotide linkage
  modified_base 23..24: mod_base = OTHER; note = phosphorothioate internucleotide linkage
tcgtataacaataaggggctgcctat

SEQ ID NO: 689 - RNA, 26 nt, synthetic construct
  source 1..26: mol_type = other RNA
  modified_base 1: mod_base = OTHER; note = 2'-OMe modified nucleotide
  modified_base 3: mod_base = OTHER; note = 2'-OMe modified nucleotide
  modified_base 5..9: mod_base = OTHER; note = 2'-OMe modified nucleotide
  modified_base 11..13: mod_base = OTHER; note = 2'-OMe modified nucleotide
  modified_base 15..24: mod_base = OTHER; note = 2'-OMe modified nucleotide
  modified_base 26: mod_base = OTHER; note = 2'-OMe modified nucleotide
  modified_base 2: mod_base = OTHER; note = 2-deoxy-2-fluoro ribonucleotide
  modified_base 4: mod_base = OTHER; note = 2-deoxy-2-fluoro ribonucleotide
  modified_base 10: mod_base = OTHER; note = 2-deoxy-2-fluoro ribonucleotide
  modified_base 14: mod_base = OTHER; note = 2-deoxy-2-fluoro ribonucleotide
  modified_base 1..2: mod_base = OTHER; note = phosphorothioate internucleotide linkage
  modified_base 2..3: mod_base = OTHER; note = phosphorothioate internucleotide linkage
  modified_base 22..23: mod_base = OTHER; note = phosphorothioate internucleotide linkage
  modified_base 23..24: mod_base = OTHER; note = phosphorothioate internucleotide linkage
tcgtataacaataaggggctgcctat

SEQ ID NO: 690 - RNA, 26 nt, synthetic construct
  source 1..26: mol_type = other RNA
  modified_base 1: mod_base = OTHER; note = 2'-OMe modified nucleotide
  modified_base 3: mod_base = OTHER; note = 2'-OMe modified nucleotide
  modified_base 5..11: mod_base = OTHER; note = 2'-OMe modified nucleotide
  modified_base 13: mod_base = OTHER; note = 2'-OMe modified nucleotide
  modified_base 15..24: mod_base = OTHER; note = 2'-OMe modified nucleotide
  modified_base 26: mod_base = OTHER; note = 2'-OMe modified nucleotide
  modified_base 2: mod_base = OTHER; note = 2-deoxy-2-fluoro ribonucleotide
  modified_base 4: mod_base = OTHER; note = 2-deoxy-2-fluoro ribonucleotide
  modified_base 12: mod_base = OTHER; note = 2-deoxy-2-fluoro ribonucleotide
  modified_base 14: mod_base = OTHER; note = 2-deoxy-2-fluoro ribonucleotide
  modified_base 1..2: mod_base = OTHER; note = phosphorothioate internucleotide linkage
  modified_base 2..3: mod_base = OTHER; note = phosphorothioate internucleotide linkage
  modified_base 22..23: mod_base = OTHER; note = phosphorothioate internucleotide linkage
  modified_base 23..24: mod_base = OTHER; note = phosphorothioate internucleotide linkage
tcgtataacaataaggggctgcctat

SEQ ID NO: 691 - RNA, 26 nt, synthetic construct
  source 1..26: mol_type = other RNA
  modified_base 1: mod_base = OTHER; note = 2'-OMe modified nucleotide
  modified_base 3..5: mod_base = OTHER; note = 2'-OMe modified nucleotide
  modified_base 7: mod_base = OTHER; note = 2'-OMe modified nucleotide
  modified_base 9..13: mod_base = OTHER; note = 2'-OMe modified nucleotide
  modified_base 15..24: mod_base = OTHER; note = 2'-OMe modified nucleotide
  modified_base 26: mod_base = OTHER; note = 2'-OMe modified nucleotide
  modified_base 2: mod_base = OTHER; note = 2-deoxy-2-fluoro ribonucleotide
  modified_base 6: mod_base = OTHER; note = 2-deoxy-2-fluoro ribonucleotide
  modified_base 8: mod_base = OTHER; note = 2-deoxy-2-fluoro ribonucleotide
  modified_base 14: mod_base = OTHER; note = 2-deoxy-2-fluoro ribonucleotide
  modified_base 1..2: mod_base = OTHER; note = phosphorothioate internucleotide linkage
  modified_base 2..3: mod_base = OTHER; note = phosphorothioate internucleotide linkage
  modified_base 22..23: mod_base = OTHER; note = phosphorothioate internucleotide linkage
  modified_base 23..24: mod_base = OTHER; note = phosphorothioate internucleotide linkage
tcgtataacaataaggggctgcctat

SEQ ID NO: 692 - RNA, 26 nt, synthetic construct
  source 1..26: mol_type = other RNA
  modified_base 1: mod_base = OTHER; note = 2'-OMe modified nucleotide
  modified_base 3..5: mod_base = OTHER; note = 2'-OMe modified nucleotide
  modified_base 7..9: mod_base = OTHER; note = 2'-OMe modified nucleotide
  modified_base 11..13: mod_base = OTHER; note = 2'-OMe modified nucleotide
  modified_base 15..24: mod_base = OTHER; note = 2'-OMe modified nucleotide
  modified_base 26: mod_base = OTHER; note = 2'-OMe modified nucleotide
  modified_base 2: mod_base = OTHER; note = 2-deoxy-2-fluoro ribonucleotide
  modified_base 6: mod_base = OTHER; note = 2-deoxy-2-fluoro ribonucleotide
  modified_base 10: mod_base = OTHER; note = 2-deoxy-2-fluoro ribonucleotide
  modified_base 14: mod_base = OTHER; note = 2-deoxy-2-fluoro ribonucleotide
  modified_base 1..2: mod_base = OTHER; note = phosphorothioate internucleotide linkage
  modified_base 2..3: mod_base = OTHER; note = phosphorothioate internucleotide linkage
  modified_base 22..23: mod_base = OTHER; note = phosphorothioate internucleotide linkage
  modified_base 23..24: mod_base = OTHER; note = phosphorothioate internucleotide linkage
tcgtataacaataaggggctgcctat

SEQ ID NO: 693 - RNA, 26 nt, synthetic construct
  source 1..26: mol_type = other RNA
  modified_base 1: mod_base = OTHER; note = 2'-OMe modified nucleotide
  modified_base 3..5: mod_base = OTHER; note = 2'-OMe modified nucleotide
  modified_base 7..11: mod_base = OTHER; note = 2'-OMe modified nucleotide
  modified_base 13: mod_base = OTHER; note = 2'-OMe modified nucleotide
  modified_base 15..24: mod_base = OTHER; note = 2'-OMe modified nucleotide
  modified_base 26: mod_base = OTHER; note = 2'-OMe modified nucleotide
  modified_base 2: mod_base = OTHER; note = 2-deoxy-2-fluoro ribonucleotide
  modified_base 6: mod_base = OTHER; note = 2-deoxy-2-fluoro ribonucleotide
  modified_base 12: mod_base = OTHER; note = 2-deoxy-2-fluoro ribonucleotide
  modified_base 14: mod_base = OTHER; note = 2-deoxy-2-fluoro ribonucleotide
  modified_base 1..2: mod_base = OTHER; note = phosphorothioate internucleotide linkage
  modified_base 2..3: mod_base = OTHER; note = phosphorothioate internucleotide linkage
  modified_base 22..23: mod_base = OTHER; note = phosphorothioate internucleotide linkage
  modified_base 23..24: mod_base = OTHER; note = phosphorothioate internucleotide linkage
tcgtataacaataaggggctgcctat

SEQ ID NO: 694 - RNA, 26 nt, synthetic construct
  source 1..26: mol_type = other RNA
  modified_base 1: mod_base = OTHER; note = 2'-OMe modified nucleotide
  modified_base 3..7: mod_base = OTHER; note = 2'-OMe modified nucleotide
  modified_base 9..11: mod_base = OTHER; note = 2'-OMe modified nucleotide
  modified_base 13: mod_base = OTHER; note = 2'-OMe modified nucleotide
  modified_base 15..24: mod_base = OTHER; note = 2'-OMe modified nucleotide
  modified_base 26: mod_base = OTHER; note = 2'-OMe modified nucleotide
  modified_base 2: mod_base = OTHER; note = 2-deoxy-2-fluoro ribonucleotide
  modified_base 8: mod_base = OTHER; note = 2-deoxy-2-fluoro ribonucleotide
  modified_base 12: mod_base = OTHER; note = 2-deoxy-2-fluoro ribonucleotide
  modified_base 14: mod_base = OTHER; note = 2-deoxy-2-fluoro ribonucleotide
  modified_base 1..2: mod_base = OTHER; note = phosphorothioate internucleotide linkage
  modified_base 2..3: mod_base = OTHER; note = phosphorothioate internucleotide linkage
  modified_base 22..23: mod_base = OTHER; note = phosphorothioate internucleotide linkage
  modified_base 23..24: mod_base = OTHER; note = phosphorothioate internucleotide linkage
tcgtataacaataaggggctgcctat

SEQ ID NO: 695 - RNA, 26 nt, synthetic construct
  source 1..26: mol_type = other RNA
  modified_base 1: mod_base = OTHER; note = 2'-OMe modified nucleotide
  modified_base 3..9: mod_base = OTHER; note = 2'-OMe modified nucleotide
  modified_base 11: mod_base = OTHER; note = 2'-OMe modified nucleotide
  modified_base 13: mod_base = OTHER; note = 2'-OMe modified nucleotide
  modified_base 15..24: mod_base = OTHER; note = 2'-OMe modified nucleotide
  modified_base 26: mod_base = OTHER; note = 2'-OMe modified nucleotide
  modified_base 2: mod_base = OTHER; note = 2-deoxy-2-fluoro ribonucleotide
  modified_base 10: mod_base = OTHER; note = 2-deoxy-2-fluoro ribonucleotide
  modified_base 12: mod_base = OTHER; note = 2-deoxy-2-fluoro ribonucleotide
  modified_base 14: mod_base = OTHER; note = 2-deoxy-2-fluoro ribonucleotide
  modified_base 1..2: mod_base = OTHER; note = phosphorothioate internucleotide linkage
  modified_base 2..3: mod_base = OTHER; note = phosphorothioate internucleotide linkage
  modified_base 22..23: mod_base = OTHER; note = phosphorothioate internucleotide linkage
  modified_base 23..24: mod_base = OTHER; note = phosphorothioate internucleotide linkage
tcgtataacaataaggggctgcctat

SEQ ID NO: 696 - RNA, 26 nt, synthetic construct
  source 1..26: mol_type = other RNA
  modified_base 1: mod_base = OTHER; note = 2'-OMe modified nucleotide
  modified_base 3: mod_base = OTHER; note = 2'-OMe modified nucleotide
  modified_base 5: mod_base = OTHER; note = 2'-OMe modified nucleotide
  modified_base 7: mod_base = OTHER; note = 2'-OMe modified nucleotide
  modified_base 9: mod_base = OTHER; note = 2'-OMe modified nucleotide
  modified_base 11: mod_base = OTHER; note = 2'-OMe modified nucleotide
  modified_base 13: mod_base = OTHER; note = 2'-OMe modified nucleotide
  modified_base 15..17: mod_base = OTHER; note = 2'-OMe modified nucleotide
  modified_base 19: mod_base = OTHER; note = 2'-OMe modified nucleotide
  modified_base 21: mod_base = OTHER; note = 2'-OMe modified nucleotide
  modified_base 23..24: mod_base = OTHER; note = 2'-OMe modified nucleotide
  modified_base 26: mod_base = OTHER; note = 2'-OMe modified nucleotide
  modified_base 2: mod_base = OTHER; note = 2-deoxy-2-fluoro ribonucleotide
  modified_base 4: mod_base = OTHER; note = 2-deoxy-2-fluoro ribonucleotide
  modified_base 6: mod_base = OTHER; note = 2-deoxy-2-fluoro ribonucleotide
  modified_base 8: mod_base = OTHER; note = 2-deoxy-2-fluoro ribonucleotide
  modified_base 10: mod_base = OTHER; note = 2-deoxy-2-fluoro ribonucleotide
  modified_base 12: mod_base = OTHER; note = 2-deoxy-2-fluoro ribonucleotide
  modified_base 14: mod_base = OTHER; note = 2-deoxy-2-fluoro ribonucleotide
  modified_base 18: mod_base = OTHER; note = 2-deoxy-2-fluoro ribonucleotide
  modified_base 20: mod_base = OTHER; note = 2-deoxy-2-fluoro ribonucleotide
  modified_base 22: mod_base = OTHER; note = 2-deoxy-2-fluoro ribonucleotide
  modified_base 1..2: mod_base = OTHER; note = phosphorothioate internucleotide linkage
  modified_base 2..3: mod_base = OTHER; note = phosphorothioate internucleotide linkage
  modified_base 22..23: mod_base = OTHER; note = phosphorothioate internucleotide linkage
  modified_base 23..24: mod_base = OTHER; note = phosphorothioate internucleotide linkage
tcgtataacaataaggggctgcctat

SEQ ID NO: 697 - RNA, 26 nt, synthetic construct
  source 1..26: mol_type = other RNA
  modified_base 1: mod_base = OTHER; note = 2'-OMe modified nucleotide
  modified_base 3: mod_base = OTHER; note = 2'-OMe modified nucleotide
  modified_base 5: mod_base = OTHER; note = 2'-OMe modified nucleotide
  modified_base 7: mod_base = OTHER; note = 2'-OMe modified nucleotide
  modified_base 9: mod_base = OTHER; note = 2'-OMe modified nucleotide
  modified_base 11: mod_base = OTHER; note = 2'-OMe modified nucleotide
  modified_base 13: mod_base = OTHER; note = 2'-OMe modified nucleotide
  modified_base 15: mod_base = OTHER; note = 2'-OMe modified nucleotide
  modified_base 17..19: mod_base = OTHER; note = 2'-OMe modified nucleotide
  modified_base 21: mod_base = OTHER; note = 2'-OMe modified nucleotide
  modified_base 23..24: mod_base = OTHER; note = 2'-OMe modified nucleotide
  modified_base 26: mod_base = OTHER; note = 2'-OMe modified nucleotide
  modified_base 2: mod_base = OTHER; note = 2-deoxy-2-fluoro ribonucleotide
  modified_base 4: mod_base = OTHER; note = 2-deoxy-2-fluoro ribonucleotide
  modified_base 6: mod_base = OTHER; note = 2-deoxy-2-fluoro ribonucleotide
  modified_base 8: mod_base = OTHER; note = 2-deoxy-2-fluoro ribonucleotide
  modified_base 10: mod_base = OTHER; note = 2-deoxy-2-fluoro ribonucleotide
  modified_base 12: mod_base = OTHER; note = 2-deoxy-2-fluoro ribonucleotide
  modified_base 14: mod_base = OTHER; note = 2-deoxy-2-fluoro ribonucleotide
  modified_base 16: mod_base = OTHER; note = 2-deoxy-2-fluoro ribonucleotide
  modified_base 20: mod_base = OTHER; note = 2-deoxy-2-fluoro ribonucleotide
  modified_base 22: mod_base = OTHER; note = 2-deoxy-2-fluoro ribonucleotide
  modified_base 1..2: mod_base = OTHER; note = phosphorothioate internucleotide linkage
  modified_base 2..3: mod_base = OTHER; note = phosphorothioate internucleotide linkage
  modified_base 22..23: mod_base = OTHER; note = phosphorothioate internucleotide linkage
  modified_base 23..24: mod_base = OTHER; note = phosphorothioate internucleotide linkage
tcgtataacaataaggggctgcctat

SEQ ID NO: 698 - RNA, 26 nt, synthetic construct
  source 1..26: mol_type = other RNA
  modified_base 1: mod_base = OTHER; note = 2'-OMe modified nucleotide
  modified_base 3: mod_base = OTHER; note = 2'-OMe modified nucleotide
  modified_base 5: mod_base = OTHER; note = 2'-OMe modified nucleotide
  modified_base 7: mod_base = OTHER; note = 2'-OMe modified nucleotide
  modified_base 9: mod_base = OTHER; note = 2'-OMe modified nucleotide
  modified_base 11: mod_base = OTHER; note = 2'-OMe modified nucleotide
  modified_base 13: mod_base = OTHER; note = 2'-OMe modified nucleotide
  modified_base 15: mod_base = OTHER; note = 2'-OMe modified nucleotide
  modified_base 17: mod_base = OTHER; note = 2'-OMe modified nucleotide
  modified_base 19..21: mod_base = OTHER; note = 2'-OMe modified nucleotide
  modified_base 23..24: mod_base = OTHER; note = 2'-OMe modified nucleotide
  modified_base 26: mod_base = OTHER; note = 2'-OMe modified nucleotide
  modified_base 2: mod_base = OTHER; note = 2-deoxy-2-fluoro ribonucleotide
  modified_base 4: mod_base = OTHER; note = 2-deoxy-2-fluoro ribonucleotide
  modified_base 6: mod_base = OTHER; note = 2-deoxy-2-fluoro ribonucleotide
  modified_base 8: mod_base = OTHER; note = 2-deoxy-2-fluoro ribonucleotide
  modified_base 10: mod_base = OTHER; note = 2-deoxy-2-fluoro ribonucleotide
  modified_base 12: mod_base = OTHER; note = 2-deoxy-2-fluoro ribonucleotide
  modified_base 14: mod_base = OTHER; note = 2-deoxy-2-fluoro ribonucleotide
  modified_base 16: mod_base = OTHER; note = 2-deoxy-2-fluoro ribonucleotide
  modified_base 18: mod_base = OTHER; note = 2-deoxy-2-fluoro ribonucleotide
  modified_base 22: mod_base = OTHER; note = 2-deoxy-2-fluoro ribonucleotide
  modified_base 1..2: mod_base = OTHER; note = phosphorothioate internucleotide linkage
  modified_base 2..3: mod_base = OTHER; note = phosphorothioate internucleotide linkage
  modified_base 22..23: mod_base = OTHER; note = phosphorothioate internucleotide linkage
  modified_base 23..24: mod_base = OTHER; note = phosphorothioate internucleotide linkage
tcgtataacaataaggggctgcctat

SEQ ID NO: 699 - RNA, 26 nt, synthetic construct
  source 1..26: mol_type = other RNA
  modified_base 1: mod_base = OTHER; note = 2'-OMe modified nucleotide
  modified_base 3: mod_base = OTHER; note = 2'-OMe modified nucleotide
  modified_base 5: mod_base = OTHER; note = 2'-OMe modified nucleotide
  modified_base 7: mod_base = OTHER; note = 2'-OMe modified nucleotide
  modified_base 9: mod_base = OTHER; note = 2'-OMe modified nucleotide
  modified_base 11: mod_base = OTHER; note = 2'-OMe modified nucleotide
  modified_base 13: mod_base = OTHER; note = 2'-OMe modified nucleotide
  modified_base 15: mod_base = OTHER; note = 2'-OMe modified nucleotide
  modified_base 17: mod_base = OTHER; note = 2'-OMe modified nucleotide
  modified_base 19: mod_base = OTHER; note = 2'-OMe modified nucleotide
  modified_base 21..24: mod_base = OTHER; note = 2'-OMe modified nucleotide
  modified_base 26: mod_base = OTHER; note = 2'-OMe modified nucleotide
  modified_base 2: mod_base = OTHER; note = 2-deoxy-2-fluoro ribonucleotide
  modified_base 4: mod_base = OTHER; note = 2-deoxy-2-fluoro ribonucleotide
  modified_base 6: mod_base = OTHER; note = 2-deoxy-2-fluoro ribonucleotide
  modified_base 8: mod_base = OTHER; note = 2-deoxy-2-fluoro ribonucleotide
  modified_base 10: mod_base = OTHER; note = 2-deoxy-2-fluoro ribonucleotide
  modified_base 12: mod_base = OTHER; note = 2-deoxy-2-fluoro ribonucleotide
  modified_base 14: mod_base = OTHER; note = 2-deoxy-2-fluoro ribonucleotide
  modified_base 16: mod_base = OTHER; note = 2-deoxy-2-fluoro ribonucleotide
  modified_base 18: mod_base = OTHER; note = 2-deoxy-2-fluoro ribonucleotide
  modified_base 20: mod_base = OTHER; note = 2-deoxy-2-fluoro ribonucleotide
  modified_base 1..2: mod_base = OTHER; note = phosphorothioate internucleotide linkage
  modified_base 2..3: mod_base = OTHER; note = phosphorothioate internucleotide linkage
  modified_base 22..23: mod_base = OTHER; note = phosphorothioate internucleotide linkage
  modified_base 23..24: mod_base = OTHER; note = phosphorothioate internucleotide linkage
tcgtataacaataaggggctgcctat

SEQ ID NO: 700 - RNA, 24 nt, synthetic construct
  source 1..24: mol_type = other RNA
  modified_base 1: mod_base = OTHER; note = 5' end Vinyl Phosphonate modification
  modified_base 1: mod_base = OTHER; note = 2'-OMe modified nucleotide
  modified_base 3: mod_base = OTHER; note = 2'-OMe modified nucleotide
  modified_base 5: mod_base = OTHER; note = 2'-OMe modified nucleotide
  modified_base 7: mod_base = OTHER; note = 2'-OMe modified nucleotide
  modified_base 11..13: mod_base = OTHER; note = 2'-OMe modified nucleotide
  modified_base 15: mod_base = OTHER; note = 2'-OMe modified nucleotide
  modified_base 17: mod_base = OTHER; note = 2'-OMe modified nucleotide
  modified_base 19: mod_base = OTHER; note = 2'-OMe modified nucleotide
  modified_base 21..24: mod_base = OTHER; note = 2'-OMe modified nucleotide
  modified_base 2: mod_base = OTHER; note = 2-deoxy-2-fluoro ribonucleotide
  modified_base 4: mod_base = OTHER; note = 2-deoxy-2-fluoro ribonucleotide
  modified_base 6: mod_base = OTHER; note = 2-deoxy-2-fluoro ribonucleotide
  modified_base 8..10: mod_base = OTHER; note = 2-deoxy-2-fluoro ribonucleotide
  modified_base 14: mod_base = OTHER; note = 2-deoxy-2-fluoro ribonucleotide
  modified_base 16: mod_base = OTHER; note = 2-deoxy-2-fluoro ribonucleotide
  modified_base 18: mod_base = OTHER; note = 2-deoxy-2-fluoro ribonucleotide
  modified_base 20: mod_base = OTHER; note = 2-deoxy-2-fluoro ribonucleotide
  modified_base 1..2: mod_base = OTHER; note = phosphorothioate internucleotide linkage
  modified_base 2..3: mod_base = OTHER; note = phosphorothioate internucleotide linkage
  modified_base 3..4: mod_base = OTHER; note = phosphorothioate internucleotide linkage
  modified_base 22..23: mod_base = OTHER; note = phosphorothioate internucleotide linkage
  modified_base 23..24: mod_base = OTHER; note = phosphorothioate internucleotide linkage
tcgtataacaataaggggctgatt

SEQ ID NO: 701 - RNA, 24 nt, synthetic construct
  source 1..24: mol_type = other RNA
  modified_base 1: mod_base = OTHER; note = 5' end Vinyl Phosphonate modification
  modified_base 1: mod_base = OTHER; note = 2'-OMe modified nucleotide
  modified_base 3: mod_base = OTHER; note = 2'-OMe modified nucleotide
  modified_base 5: mod_base = OTHER; note = 2'-OMe modified nucleotide
  modified_base 7: mod_base = OTHER; note = 2'-OMe modified nucleotide
  modified_base 11..13: mod_base = OTHER; note = 2'-OMe modified nucleotide
  modified_base 15: mod_base = OTHER; note = 2'-OMe modified nucleotide
  modified_base 17: mod_base = OTHER; note = 2'-OMe modified nucleotide
  modified_base 19: mod_base = OTHER; note = 2'-OMe modified nucleotide
  modified_base 21..24: mod_base = OTHER; note = 2'-OMe modified nucleotide
  modified_base 2: mod_base = OTHER; note = 2-deoxy-2-fluoro ribonucleotide
  modified_base 4: mod_base = OTHER; note = 2-deoxy-2-fluoro ribonucleotide
  modified_base 6: mod_base = OTHER; note = 2-deoxy-2-fluoro ribonucleotide
  modified_base 8..10: mod_base = OTHER; note = 2-deoxy-2-fluoro ribonucleotide
  modified_base 14: mod_base = OTHER; note = 2-deoxy-2-fluoro ribonucleotide
  modified_base 16: mod_base = OTHER; note = 2-deoxy-2-fluoro ribonucleotide
  modified_base 18: mod_base = OTHER; note = 2-deoxy-2-fluoro ribonucleotide
  modified_base 20: mod_base = OTHER; note = 2-deoxy-2-fluoro ribonucleotide
  modified_base 1..2: mod_base = OTHER; note = phosphorothioate internucleotide linkage
  modified_base 2..3: mod_base = OTHER; note = phosphorothioate internucleotide linkage
  modified_base 3..4: mod_base = OTHER; note = phosphorothioate internucleotide linkage
  modified_base 22..23: mod_base = OTHER; note = phosphorothioate internucleotide linkage
  modified_base 23..24: mod_base = OTHER; note = phosphorothioate internucleotide linkage
tcgtataacaataaggggctgctt

SEQ ID NO: 702 - RNA, 24 nt, synthetic construct
  source 1..24: mol_type = other RNA
  modified_base 1: mod_base = OTHER; note = 5' end Vinyl Phosphonate modification
  modified_base 1: mod_base = OTHER; note = 2'-OMe modified nucleotide
  modified_base 3..7: mod_base = OTHER; note = 2'-OMe modified nucleotide
  modified_base 9: mod_base = OTHER; note = 2'-OMe modified nucleotide
  modified_base 11..13: mod_base = OTHER; note = 2'-OMe modified nucleotide
  modified_base 15..24: mod_base = OTHER; note = 2'-OMe modified nucleotide
  modified_base 2: mod_base = OTHER; note = 2-deoxy-2-fluoro ribonucleotide
  modified_base 8: mod_base = OTHER; note = 2-deoxy-2-fluoro ribonucleotide
  modified_base 10: mod_base = OTHER; note = 2-deoxy-2-fluoro ribonucleotide
  modified_base 14: mod_base = OTHER; note = 2-deoxy-2-fluoro ribonucleotide
  modified_base 1..2: mod_base = OTHER; note = phosphorothioate internucleotide linkage
  modified_base 2..3: mod_base = OTHER; note = phosphorothioate internucleotide linkage
  modified_base 3..4: mod_base = OTHER; note = phosphorothioate internucleotide linkage
  modified_base 22..23: mod_base = OTHER; note = phosphorothioate internucleotide linkage
  modified_base 23..24: mod_base = OTHER; note = phosphorothioate internucleotide linkage
tgagaatgagcctcgataactctt

SEQ ID NO: 703 - RNA, 26 nt, synthetic construct
  source 1..26: mol_type = other RNA
  modified_base 1: mod_base = OTHER; note = 2'-OMe modified nucleotide
  modified_base 3..5: mod_base = OTHER; note = 2'-OMe modified nucleotide
  modified_base 7: mod_base = OTHER; note = 2'-OMe modified nucleotide
  modified_base 9..13: mod_base = OTHER; note = 2'-OMe modified nucleotide
  modified_base 15: mod_base = OTHER; note = 2'-OMe modified nucleotide
  modified_base 17..24: mod_base = OTHER; note = 2'-OMe modified nucleotide
  modified_base 26: mod_base = OTHER; note = 2'-OMe modified nucleotide
  modified_base 2: mod_base = OTHER; note = 2-deoxy-2-fluoro ribonucleotide
  modified_base 6: mod_base = OTHER; note = 2-deoxy-2-fluoro ribonucleotide
  modified_base 8: mod_base = OTHER; note = 2-deoxy-2-fluoro ribonucleotide
  modified_base 14: mod_base = OTHER; note = 2-deoxy-2-fluoro ribonucleotide
  modified_base 16: mod_base = OTHER; note = 2-deoxy-2-fluoro ribonucleotide
  modified_base 1..2: mod_base = OTHER; note = phosphorothioate internucleotide linkage
  modified_base 2..3: mod_base = OTHER; note = phosphorothioate internucleotide linkage
  modified_base 22..23: mod_base = OTHER; note = phosphorothioate internucleotide linkage
  modified_base 23..24: mod_base = OTHER; note = phosphorothioate internucleotide linkage
tcgtataacaataaggggctgcctat

SEQ ID NO: 704 - RNA, 26 nt, synthetic construct
  source 1..26: mol_type = other RNA
  modified_base 1: mod_base = OTHER; note = 2'-OMe modified nucleotide
  modified_base 3..5: mod_base = OTHER; note = 2'-OMe modified nucleotide
  modified_base 7: mod_base = OTHER; note = 2'-OMe modified nucleotide
  modified_base 10..13: mod_base = OTHER; note = 2'-OMe modified nucleotide
  modified_base 15: mod_base = OTHER; note = 2'-OMe modified nucleotide
  modified_base 17..24: mod_base = OTHER; note = 2'-OMe modified nucleotide
  modified_base 26: mod_base = OTHER; note = 2'-OMe modified nucleotide
  modified_base 2: mod_base = OTHER; note = 2-deoxy-2-fluoro ribonucleotide
  modified_base 6: mod_base = OTHER; note = 2-deoxy-2-fluoro ribonucleotide
  modified_base 8..9: mod_base = OTHER; note = 2-deoxy-2-fluoro ribonucleotide
  modified_base 14: mod_base = OTHER; note = 2-deoxy-2-fluoro ribonucleotide
  modified_base 16: mod_base = OTHER; note = 2-deoxy-2-fluoro ribonucleotide
  modified_base 1..2: mod_base = OTHER; note = phosphorothioate internucleotide linkage
  modified_base 2..3: mod_base = OTHER; note = phosphorothioate internucleotide linkage
  modified_base 22..23: mod_base = OTHER; note = phosphorothioate internucleotide linkage
  modified_base 23..24: mod_base = OTHER; note = phosphorothioate internucleotide linkage
tcgtataacaataaggggctgcctat

SEQ ID NO: 705 - RNA, 26 nt, synthetic construct
  source 1..26: mol_type = other RNA
  modified_base 1: mod_base = OTHER; note = 2'-OMe modified nucleotide
  modified_base 3..5: mod_base = OTHER; note = 2'-OMe modified nucleotide
  modified_base 7: mod_base = OTHER; note = 2'-OMe modified nucleotide
  modified_base 9..13: mod_base = OTHER; note = 2'-OMe modified nucleotide
  modified_base 15: mod_base = OTHER; note = 2'-OMe modified nucleotide
  modified_base 17..24: mod_base = OTHER; note = 2'-OMe modified nucleotide
  modified_base 26: mod_base = OTHER; note = 2'-OMe modified nucleotide
  modified_base 2: mod_base = OTHER; note = 2-deoxy-2-fluoro ribonucleotide
  modified_base 6: mod_base = OTHER; note = 2-deoxy-2-fluoro ribonucleotide
  modified_base 8: mod_base = OTHER; note = 2-deoxy-2-fluoro ribonucleotide
  modified_base 14: mod_base = OTHER; note = 2-deoxy-2-fluoro ribonucleotide
  modified_base 16: mod_base = OTHER; note = 2-deoxy-2-fluoro ribonucleotide
  modified_base 1..2: mod_base = OTHER; note = phosphorothioate internucleotide linkage
  modified_base 2..3: mod_base = OTHER; note = phosphorothioate internucleotide linkage
  modified_base 22..23: mod_base = OTHER; note = phosphorothioate internucleotide linkage
  modified_base 23..24: mod_base = OTHER; note = phosphorothioate internucleotide linkage
tgagaatgagcctcgataactcttat

SEQ ID NO: 706 - RNA, 26 nt, synthetic construct
  source 1..26: mol_type = other RNA
  modified_base 1: mod_base = OTHER; note = 2'-OMe modified nucleotide
  modified_base 3..5: mod_base = OTHER; note = 2'-OMe modified nucleotide
  modified_base 7: mod_base = OTHER; note = 2'-OMe modified nucleotide
  modified_base 10..13: mod_base = OTHER; note = 2'-OMe modified nucleotide
  modified_base 15: mod_base = OTHER; note = 2'-OMe modified nucleotide
  modified_base 17..24: mod_base = OTHER; note = 2'-OMe modified nucleotide
  modified_base 26: mod_base = OTHER; note = 2'-OMe modified nucleotide
  modified_base 2: mod_base = OTHER; note = 2-deoxy-2-fluoro ribonucleotide
  modified_base 6: mod_base = OTHER; note = 2-deoxy-2-fluoro ribonucleotide
  modified_base 8..9: mod_base = OTHER; note = 2-deoxy-2-fluoro ribonucleotide
  modified_base 14: mod_base = OTHER; note = 2-deoxy-2-fluoro ribonucleotide
  modified_base 16: mod_base = OTHER; note = 2-deoxy-2-fluoro ribonucleotide
  modified_base 1..2: mod_base = OTHER; note = phosphorothioate internucleotide linkage
  modified_base 2..3: mod_base = OTHER; note = phosphorothioate internucleotide linkage
  modified_base 22..23: mod_base = OTHER; note = phosphorothioate internucleotide linkage
  modified_base 23..24: mod_base = OTHER; note = phosphorothioate internucleotide linkage
tgagaatgagcctcgataactcttat

SEQ ID NO: 707 - RNA, 26 nt, synthetic construct
  source 1..26: mol_type = other RNA
  modified_base 1: mod_base = OTHER; note = 2'-OMe modified nucleotide
  modified_base 3: mod_base = OTHER; note = 2'-OMe modified nucleotide
  modified_base 5: mod_base = OTHER; note = 2'-OMe modified nucleotide
  modified_base 7: mod_base = OTHER; note = 2'-OMe modified nucleotide
  modified_base 11: mod_base = OTHER; note = 2'-OMe modified nucleotide
  modified_base 12: mod_base = OTHER; note = 2'-OMe modified nucleotide
  modified_base 13: mod_base = OTHER; note = 2'-OMe modified nucleotide
  modified_base 15: mod_base = OTHER; note = 2'-OMe modified nucleotide
  modified_base 17: mod_base = OTHER; note = 2'-OMe modified nucleotide
  modified_base 19: mod_base = OTHER; note = 2'-OMe modified nucleotide
  modified_base 21..24: mod_base = OTHER; note = 2'-OMe modified nucleotide
  modified_base 26: mod_base = OTHER; note = 2'-OMe modified nucleotide
  modified_base 1: mod_base = OTHER; note = 5' end Vinyl Phosphonate modification
  modified_base 2: mod_base = OTHER; note = 2-deoxy-2-fluoro ribonucleotide
  modified_base 4: mod_base = OTHER; note = 2-deoxy-2-fluoro ribonucleotide
  modified_base 6: mod_base = OTHER; note = 2-deoxy-2-fluoro ribonucleotide
  modified_base 8..10: mod_base = OTHER; note = 2-deoxy-2-fluoro ribonucleotide
  modified_base 14: mod_base = OTHER; note = 2-deoxy-2-fluoro ribonucleotide
  modified_base 16: mod_base = OTHER; note = 2-deoxy-2-fluoro ribonucleotide
  modified_base 18: mod_base = OTHER; note = 2-deoxy-2-fluoro ribonucleotide
  modified_base 20: mod_base = OTHER; note = 2-deoxy-2-fluoro ribonucleotide
  modified_base 1..2: mod_base = OTHER; note = phosphorothioate internucleotide linkage
  modified_base 2..3: mod_base = OTHER; note = phosphorothioate internucleotide linkage
  modified_base 22..23: mod_base = OTHER; note = phosphorothioate internucleotide linkage
  modified_base 23..24: mod_base = OTHER; note = phosphorothioate internucleotide linkage
tcgtataacaataaggggctgcctat

SEQ ID NO: 708 - RNA, 21 nt, synthetic construct
  source 1..21: mol_type = other RNA
  modified_base 1: mod_base = OTHER; note = 5' end Vinyl Phosphonate modification
  modified_base 1: mod_base = OTHER; note = 2'-OMe modified nucleotide
  modified_base 3: mod_base = OTHER; note = 2'-OMe modified nucleotide
  modified_base 5: mod_base = OTHER; note = 2'-OMe modified nucleotide
  modified_base 7: mod_base = OTHER; note = 2'-OMe modified nucleotide
  modified_base 11..13: mod_base = OTHER; note = 2'-OMe modified nucleotide
  modified_base 15: mod_base = OTHER; note = 2'-OMe modified nucleotide
  modified_base 17: mod_base = OTHER; note = 2'-OMe modified nucleotide
  modified_base 19..21: mod_base = OTHER; note = 2'-OMe modified nucleotide
  modified_base 2: mod_base = OTHER; note = 2-deoxy-2-fluoro ribonucleotide
  modified_base 4: mod_base = OTHER; note = 2-deoxy-2-fluoro ribonucleotide
  modified_base 6: mod_base = OTHER; note = 2-deoxy-2-fluoro ribonucleotide
  modified_base 8..10: mod_base = OTHER; note = 2-deoxy-2-fluoro ribonucleotide
  modified_base 14: mod_base = OTHER; note = 2-deoxy-2-fluoro ribonucleotide
  modified_base 16: mod_base = OTHER; note = 2-deoxy-2-fluoro ribonucleotide
  modified_base 18: mod_base = OTHER; note = 2-deoxy-2-fluoro ribonucleotide
  modified_base 1..2: mod_base = OTHER; note = phosphorothioate internucleotide linkage
  modified_base 2..3: mod_base = OTHER; note = phosphorothioate internucleotide linkage
  modified_base 3..4: mod_base = OTHER; note = phosphorothioate internucleotide linkage
  modified_base 20..21: mod_base = OTHER; note = phosphorothioate internucleotide linkage
tcgtataacaataaggggctt

SEQ ID NO: 709 - RNA, 21 nt, synthetic construct
  source 1..21: mol_type = other RNA
  modified_base 1: mod_base = OTHER; note = 2'-OMe modified nucleotide
  modified_base 3: mod_base = OTHER; note = 2'-OMe modified nucleotide
  modified_base 5: mod_base = OTHER; note = 2'-OMe modified nucleotide
  modified_base 7: mod_base = OTHER; note = 2'-OMe modified nucleotide
  modified_base 11..13: mod_base = OTHER; note = 2'-OMe modified nucleotide
  modified_base 15: mod_base = OTHER; note = 2'-OMe modified nucleotide
  modified_base 17: mod_base = OTHER; note = 2'-OMe modified nucleotide
  modified_base 19..21: mod_base = OTHER; note = 2'-OMe modified nucleotide
  modified_base 2: mod_base = OTHER; note = 2-deoxy-2-fluoro ribonucleotide
  modified_base 4: mod_base = OTHER; note = 2-deoxy-2-fluoro ribonucleotide
  modified_base 6: mod_base = OTHER; note = 2-deoxy-2-fluoro ribonucleotide
  modified_base 8..10: mod_base = OTHER; note = 2-deoxy-2-fluoro ribonucleotide
  modified_base 14: mod_base = OTHER; note = 2-deoxy-2-fluoro ribonucleotide
  modified_base 16: mod_base = OTHER; note = 2-deoxy-2-fluoro ribonucleotide
  modified_base 18: mod_base = OTHER; note = 2-deoxy-2-fluoro ribonucleotide
  modified_base 1..2: mod_base = OTHER; note = phosphorothioate internucleotide linkage
  modified_base 2..3: mod_base = OTHER; note = phosphorothioate internucleotide linkage
  modified_base 3..4: mod_base = OTHER; note = phosphorothioate internucleotide linkage
  modified_base 20..21: mod_base = OTHER; note = phosphorothioate internucleotide linkage
tcgtataacaataaggggctt

SEQ ID NO: 710 - RNA, 21 nt, synthetic construct
  source 1..21: mol_type = other RNA
  modified_base 1: mod_base = OTHER; note = 2',3'-seco nucleotide
  modified_base 3: mod_base = OTHER; note = 2'-OMe modified nucleotide
  modified_base 5: mod_base = OTHER; note = 2'-OMe modified nucleotide
  modified_base 7: mod_base = OTHER; note = 2'-OMe modified nucleotide
  modified_base 11..13: mod_base = OTHER; note = 2'-OMe modified nucleotide
  modified_base 15: mod_base = OTHER; note = 2'-OMe modified nucleotide
  modified_base 17: mod_base = OTHER; note = 2'-OMe modified nucleotide
  modified_base 19..21: mod_base = OTHER; note = 2'-OMe modified nucleotide
  modified_base 2: mod_base = OTHER; note = 2-deoxy-2-fluoro ribonucleotide
  modified_base 4: mod_base = OTHER; note = 2-deoxy-2-fluoro ribonucleotide
  modified_base 6: mod_base = OTHER; note = 2-deoxy-2-fluoro ribonucleotide
  modified_base 8..10: mod_base = OTHER; note = 2-deoxy-2-fluoro ribonucleotide
  modified_base 14: mod_base = OTHER; note = 2-deoxy-2-fluoro ribonucleotide
  modified_base 16: mod_base = OTHER; note = 2-deoxy-2-fluoro ribonucleotide
  modified_base 18: mod_base = OTHER; note = 2-deoxy-2-fluoro ribonucleotide
  modified_base 1..2: mod_base = OTHER; note = phosphorothioate internucleotide linkage
  modified_base 2..3: mod_base = OTHER; note = phosphorothioate internucleotide linkage
  modified_base 3..4: mod_base = OTHER; note = phosphorothioate internucleotide linkage
  modified_base 20..21: mod_base = OTHER; note = phosphorothioate internucleotide linkage
tcgtataacaataaggggctt

SEQ ID NO: 711 - RNA, 26 nt, synthetic construct
  source 1..26: mol_type = other RNA
  modified_base 1: mod_base = OTHER; note = 2'-OMe modified nucleotide
  modified_base 3: mod_base = OTHER; note = 2'-OMe modified nucleotide
  modified_base 5: mod_base = OTHER; note = 2'-OMe modified nucleotide
  modified_base 7: mod_base = OTHER; note = 2'-OMe modified nucleotide
  modified_base 9: mod_base = OTHER; note = 2'-OMe modified nucleotide
  modified_base 11..13: mod_base = OTHER; note = 2'-OMe modified nucleotide
  modified_base 15: mod_base = OTHER; note = 2'-OMe modified nucleotide
  modified_base 17: mod_base = OTHER; note = 2'-OMe modified nucleotide
  modified_base 19: mod_base = OTHER; note = 2'-OMe modified nucleotide
  modified_base 21..26: mod_base = OTHER; note = 2'-OMe modified nucleotide
  modified_base 2: mod_base = OTHER; note = 2-deoxy-2-fluoro ribonucleotide
  modified_base 4: mod_base = OTHER; note = 2-deoxy-2-fluoro ribonucleotide
  modified_base 6: mod_base = OTHER; note = 2-deoxy-2-fluoro ribonucleotide
  modified_base 8: mod_base = OTHER; note = 2-deoxy-2-fluoro ribonucleotide
  modified_base 10: mod_base = OTHER; note = 2-deoxy-2-fluoro ribonucleotide
  modified_base 14: mod_base = OTHER; note = 2-deoxy-2-fluoro ribonucleotide
  modified_base 16: mod_base = OTHER; note = 2-deoxy-2-fluoro ribonucleotide
  modified_base 18: mod_base = OTHER; note = 2-deoxy-2-fluoro ribonucleotide
  modified_base 20: mod_base = OTHER; note = 2-deoxy-2-fluoro ribonucleotide
  modified_base 1..2: mod_base = OTHER; note = phosphorothioate internucleotide linkage
  modified_base 2..3: mod_base = OTHER; note = phosphorothioate internucleotide linkage
  modified_base 22..23: mod_base = OTHER; note = phosphorothioate internucleotide linkage
  modified_base 23..24: mod_base = OTHER; note = phosphorothioate internucleotide linkage
tgagaatgagcctcgataactcttat

SEQ ID NO: 712 - RNA, 26 nt, synthetic construct
  source 1..26: mol_type = other RNA
  modified_base 1: mod_base = OTHER; note = 2'-OMe modified nucleotide
  modified_base 3..7: mod_base = OTHER; note = 2'-OMe modified nucleotide
  modified_base 9: mod_base = OTHER; note = 2'-OMe modified nucleotide
  modified_base 11..13: mod_base = OTHER; note = 2'-OMe modified nucleotide
  modified_base 15..26: mod_base = OTHER; note = 2'-OMe modified nucleotide
  modified_base 2: mod_base = OTHER; note = 2-deoxy-2-fluoro ribonucleotide
  modified_base 8: mod_base = OTHER; note = 2-deoxy-2-fluoro ribonucleotide
  modified_base 10: mod_base = OTHER; note = 2-deoxy-2-fluoro ribonucleotide
  modified_base 14: mod_base = OTHER; note = 2-deoxy-2-fluoro ribonucleotide
  modified_base 1..2: mod_base = OTHER; note = phosphorothioate internucleotide linkage
  modified_base 2..3: mod_base = OTHER; note = phosphorothioate internucleotide linkage
  modified_base 22..23: mod_base = OTHER; note = phosphorothioate internucleotide linkage
  modified_base 23..24: mod_base = OTHER; note = phosphorothioate internucleotide linkage
tgagaatgagcctcgataactcttat

SEQ ID NO: 713 - RNA, 26 nt, synthetic construct
  source 1..26: mol_type = other RNA
  modified_base 1: mod_base = OTHER; note = 2'-OMe modified nucleotide
  modified_base 3: mod_base = OTHER; note = 2'-OMe modified nucleotide
  modified_base 5: mod_base = OTHER; note = 2'-OMe modified nucleotide
  modified_base 7: mod_base = OTHER; note = 2'-OMe modified nucleotide
  modified_base 11..13: mod_base = OTHER; note = 2'-OMe modified nucleotide
  modified_base 15: mod_base = OTHER; note = 2'-OMe modified nucleotide
  modified_base 17: mod_base = OTHER; note = 2'-OMe modified nucleotide
  modified_base 19: mod_base = OTHER; note = 2'-OMe modified nucleotide
  modified_base 21..26: mod_base = OTHER; note = 2'-OMe modified nucleotide
  modified_base 2: mod_base = OTHER; note = 2-deoxy-2-fluoro ribonucleotide
  modified_base 4: mod_base = OTHER; note = 2-deoxy-2-fluoro ribonucleotide
  modified_base 6: mod_base = OTHER; note = 2-deoxy-2-fluoro ribonucleotide
  modified_base 8..10: mod_base = OTHER; note = 2-deoxy-2-fluoro ribonucleotide
  modified_base 14: mod_base = OTHER; note = 2-deoxy-2-fluoro ribonucleotide
  modified_base 16: mod_base = OTHER; note = 2-deoxy-2-fluoro ribonucleotide
  modified_base 18: mod_base = OTHER; note = 2-deoxy-2-fluoro ribonucleotide
  modified_base 20: mod_base = OTHER; note = 2-deoxy-2-fluoro ribonucleotide
  modified_base 1..2: mod_base = OTHER; note = phosphorothioate internucleotide linkage
  modified_base 2..3: mod_base = OTHER; note = phosphorothioate internucleotide linkage
  modified_base 22..23: mod_base = OTHER; note = phosphorothioate internucleotide linkage
  modified_base 23..24: mod_base = OTHER; note = phosphorothioate internucleotide linkage
tgagaatgagcctcgataactcttat

SEQ ID NO: 714 - RNA, 26 nt, synthetic construct
  source 1..26: mol_type = other RNA
  modified_base 1: mod_base = OTHER; note = 2'-OMe modified nucleotide
  modified_base 3..7: mod_base = OTHER; note = 2'-OMe modified nucleotide
  modified_base 11..13: mod_base = OTHER; note = 2'-OMe modified nucleotide
  modified_base 15..26: mod_base = OTHER; note = 2'-OMe modified nucleotide
  modified_base 2: mod_base = OTHER; note = 2-deoxy-2-fluoro ribonucleotide
  modified_base 8..10: mod_base = OTHER; note = 2-deoxy-2-fluoro ribonucleotide
  modified_base 14: mod_base = OTHER; note = 2-deoxy-2-fluoro ribonucleotide
  modified_base 1..2: mod_base = OTHER; note = phosphorothioate internucleotide linkage
  modified_base 2..3: mod_base = OTHER; note = phosphorothioate internucleotide linkage
  modified_base 22..23: mod_base = OTHER; note = phosphorothioate internucleotide linkage
  modified_base 23..24: mod_base = OTHER; note = phosphorothioate internucleotide linkage
tgagaatgagcctcgataactcttat

SEQ ID NO: 715 - RNA, 26 nt, synthetic construct
  source 1..26: mol_type = other RNA
  modified_base 1: mod_base = OTHER; note = 2'-OMe modified nucleotide
  modified_base 3: mod_base = OTHER; note = 2'-OMe modified nucleotide
  modified_base 5: mod_base = OTHER; note = 2'-OMe modified nucleotide
  modified_base 7: mod_base = OTHER; note = 2'-OMe modified nucleotide
  modified_base 10..13: mod_base = OTHER; note = 2'-OMe modified nucleotide
  modified_base 15: mod_base = OTHER; note = 2'-OMe modified nucleotide
  modified_base 17: mod_base = OTHER; note = 2'-OMe modified nucleotide
  modified_base 19: mod_base = OTHER; note = 2'-OMe modified nucleotide
  modified_base 21..26: mod_base = OTHER; note = 2'-OMe modified nucleotide
  modified_base 2: mod_base = OTHER; note = 2-deoxy-2-fluoro ribonucleotide
  modified_base 4: mod_base = OTHER; note = 2-deoxy-2-fluoro ribonucleotide
  modified_base 6: mod_base = OTHER; note = 2-deoxy-2-fluoro ribonucleotide
  modified_base 8..9: mod_base = OTHER; note = 2-deoxy-2-fluoro ribonucleotide
  modified_base 14: mod_base = OTHER; note = 2-deoxy-2-fluoro ribonucleotide
  modified_base 16: mod_base = OTHER; note = 2-deoxy-2-fluoro ribonucleotide
  modified_base 18: mod_base = OTHER; note = 2-deoxy-2-fluoro ribonucleotide
  modified_base 20: mod_base = OTHER; note = 2-deoxy-2-fluoro ribonucleotide
  modified_base 1..2: mod_base = OTHER; note = phosphorothioate internucleotide linkage
  modified_base 2..3: mod_base = OTHER; note = phosphorothioate internucleotide linkage
  modified_base 22..23: mod_base = OTHER; note = phosphorothioate internucleotide linkage
  modified_base 23..24: mod_base = OTHER; note = phosphorothioate internucleotide linkage
tgagaatgagcctcgataactcttat

SEQ ID NO: 716 - RNA, 26 nt, synthetic construct
  source 1..26: mol_type = other RNA
  modified_base 1: mod_base = OTHER; note = 2'-OMe modified nucleotide
  modified_base 3..7: mod_base = OTHER; note = 2'-OMe modified nucleotide
  modified_base 10..13: mod_base = OTHER; note = 2'-OMe modified nucleotide
  modified_base 15..26: mod_base = OTHER; note = 2'-OMe modified nucleotide
  modified_base 2: mod_base = OTHER; note = 2-deoxy-2-fluoro ribonucleotide
  modified_base 8..9: mod_base = OTHER; note = 2-deoxy-2-fluoro ribonucleotide
  modified_base 14: mod_base = OTHER; note = 2-deoxy-2-fluoro ribonucleotide
  modified_base 1..2: mod_base = OTHER; note = phosphorothioate internucleotide linkage
  modified_base 2..3: mod_base = OTHER; note = phosphorothioate internucleotide linkage
  modified_base 22..23: mod_base = OTHER; note = phosphorothioate internucleotide linkage
  modified_base 23..24: mod_base = OTHER; note = phosphorothioate internucleotide linkage
tgagaatgagcctcgataactcttat

SEQ ID NO: 717 - RNA, 26 nt, synthetic construct
  source 1..26: mol_type = other RNA
  modified_base 1: mod_base = OTHER; note = 2'-OMe modified nucleotide
  modified_base 3..7: mod_base = OTHER; note = 2'-OMe modified nucleotide
  modified_base 9: mod_base = OTHER; note = 2'-OMe modified nucleotide
  modified_base 11..13: mod_base = OTHER; note = 2'-OMe modified nucleotide
  modified_base 15..26: mod_base = OTHER; note = 2'-OMe modified nucleotide
  modified_base 2: mod_base = OTHER; note = 2-deoxy-2-fluoro ribonucleotide
  modified_base 8: mod_base = OTHER; note = 2-deoxy-2-fluoro ribonucleotide
  modified_base 10: mod_base = OTHER; note = 2-deoxy-2-fluoro ribonucleotide
  modified_base 14: mod_base = OTHER; note = 2-deoxy-2-fluoro ribonucleotide
  modified_base 1..2: mod_base = OTHER; note = phosphorothioate internucleotide linkage
  modified_base 2..3: mod_base = OTHER; note = phosphorothioate internucleotide linkage
  modified_base 22..23: mod_base = OTHER; note = phosphorothioate internucleotide linkage
  modified_base 23..24: mod_base = OTHER; note = phosphorothioate internucleotide linkage
tgagaatgagcctcgataactcttat

SEQ ID NO: 718 - RNA, 26 nt, synthetic construct
  source 1..26: mol_type = other RNA
  modified_base 1: mod_base = OTHER; note = 2'-OMe modified nucleotide
  modified_base 3: mod_base = OTHER; note = 2'-OMe modified nucleotide
  modified_base 5: mod_base = OTHER; note = 2'-OMe modified nucleotide
  modified_base 7..8: mod_base = OTHER; note = 2'-OMe modified nucleotide
  modified_base 10..11: mod_base = OTHER; note = 2'-OMe modified nucleotide
  modified_base 13: mod_base = OTHER; note = 2'-OMe modified nucleotide
  modified_base 15: mod_base = OTHER; note = 2'-OMe modified nucleotide
  modified_base 17: mod_base = OTHER; note = 2'-OMe modified nucleotide
  modified_base 19: mod_base = OTHER; note = 2'-OMe modified nucleotide
  modified_base 21: mod_base = OTHER; note = 2'-OMe modified nucleotide
  modified_base 23..24: mod_base = OTHER; note = 2'-OMe modified nucleotide
  modified_base 26: mod_base = OTHER; note = 2'-OMe modified nucleotide
  modified_base 2: mod_base = OTHER; note = 2-deoxy-2-fluoro ribonucleotide
  modified_base 4: mod_base = OTHER; note = 2-deoxy-2-fluoro ribonucleotide
  modified_base 6: mod_base = OTHER; note = 2-deoxy-2-fluoro ribonucleotide
  modified_base 9: mod_base = OTHER; note = 2-deoxy-2-fluoro ribonucleotide
  modified_base 12: mod_base = OTHER; note = 2-deoxy-2-fluoro ribonucleotide
  modified_base 14: mod_base = OTHER; note = 2-deoxy-2-fluoro ribonucleotide
  modified_base 16: mod_base = OTHER; note = 2-deoxy-2-fluoro ribonucleotide
  modified_base 18: mod_base = OTHER; note = 2-deoxy-2-fluoro ribonucleotide
  modified_base 20: mod_base = OTHER; note = 2-deoxy-2-fluoro ribonucleotide
  modified_base 22: mod_base = OTHER; note = 2-deoxy-2-fluoro ribonucleotide
  modified_base 1..2: mod_base = OTHER; note = phosphorothioate internucleotide linkage
  modified_base 2..3: mod_base = OTHER; note = phosphorothioate internucleotide linkage
  modified_base 22..23: mod_base = OTHER; note = phosphorothioate internucleotide linkage
  modified_base 23..24: mod_base = OTHER; note = phosphorothioate internucleotide linkage
tcgtataacaataaggggctgcctat

SEQ ID NO: 719 - RNA, 26 nt, synthetic construct
  source 1..26: mol_type = other RNA
  modified_base 1: mod_base = OTHER; note = 2'-OMe modified nucleotide
  modified_base 3..7: mod_base = OTHER; note = 2'-OMe modified nucleotide
  modified_base 9..11: mod_base = OTHER; note = 2'-OMe modified nucleotide
  modified_base 13: mod_base = OTHER; note = 2'-OMe modified nucleotide
  modified_base 15..21: mod_base = OTHER; note = 2'-OMe modified nucleotide
  modified_base 23..24: mod_base = OTHER; note = 2'-OMe modified nucleotide
  modified_base 26: mod_base = OTHER; note = 2'-OMe modified nucleotide
  modified_base 2: mod_base = OTHER; note = 2-deoxy-2-fluoro ribonucleotide
  modified_base 8: mod_base = OTHER; note = 2-deoxy-2-fluoro ribonucleotide
  modified_base 12: mod_base = OTHER; note = 2-deoxy-2-fluoro ribonucleotide
  modified_base 14: mod_base = OTHER; note = 2-deoxy-2-fluoro ribonucleotide
  modified_base 22: mod_base = OTHER; note = 2-deoxy-2-fluoro ribonucleotide
  modified_base 1..2: mod_base = OTHER; note = phosphorothioate internucleotide linkage
  modified_base 2..3: mod_base = OTHER; note = phosphorothioate internucleotide linkage
  modified_base 22..23: mod_base = OTHER; note = phosphorothioate internucleotide linkage
  modified_base 23..24: mod_base = OTHER; note = phosphorothioate internucleotide linkage
tcgtataacaataaggggctgcctat

SEQ ID NO: 720 - RNA, 26 nt, synthetic construct
  source 1..26: mol_type = other RNA
  modified_base 1: mod_base = OTHER; note = 2'-OMe modified nucleotide
  modified_base 3..8: mod_base = OTHER; note = 2'-OMe modified nucleotide
  modified_base 10..11: mod_base = OTHER; note = 2'-OMe modified nucleotide
  modified_base 13: mod_base = OTHER; note = 2'-OMe modified nucleotide
  modified_base 15..21: mod_base = OTHER; note = 2'-OMe modified nucleotide
  modified_base 23..24: mod_base = OTHER; note = 2'-OMe modified nucleotide
  modified_base 26: mod_base = OTHER; note = 2'-OMe modified nucleotide
  modified_base 2: mod_base = OTHER; note = 2-deoxy-2-fluoro ribonucleotide
  modified_base 9: mod_base = OTHER; note = 2-deoxy-2-fluoro ribonucleotide
  modified_base 12: mod_base = OTHER; note = 2-deoxy-2-fluoro ribonucleotide
  modified_base 14: mod_base = OTHER; note = 2-deoxy-2-fluoro ribonucleotide
  modified_base 22: mod_base = OTHER; note = 2-deoxy-2-fluoro ribonucleotide
  modified_base 1..2: mod_base = OTHER; note = phosphorothioate internucleotide linkage
  modified_base 2..3: mod_base = OTHER; note = phosphorothioate internucleotide linkage
  modified_base 22..23: mod_base = OTHER; note = phosphorothioate internucleotide linkage
  modified_base 23..24: mod_base = OTHER; note = phosphorothioate internucleotide linkage
tcgtataacaataaggggctgcctat

SEQ ID NO: 721 - RNA, 26 nt, synthetic construct
  source 1..26: mol_type = other RNA
  modified_base 1: mod_base = OTHER; note = 2'-OMe modified nucleotide
  modified_base 3..8: mod_base = OTHER; note = 2'-OMe modified nucleotide
  modified_base 10..11: mod_base = OTHER; note = 2'-OMe modified nucleotide
  modified_base 13: mod_base = OTHER; note = 2'-OMe modified nucleotide
  modified_base 15..18: mod_base = OTHER; note = 2'-OMe modified nucleotide
  modified_base 20..21: mod_base = OTHER; note = 2'-OMe modified nucleotide
  modified_base 23..24: mod_base = OTHER; note = 2'-OMe modified nucleotide
  modified_base 26: mod_base = OTHER; note = 2'-OMe modified nucleotide
  modified_base 2: mod_base = OTHER; note = 2-deoxy-2-fluoro ribonucleotide
  modified_base 9: mod_base = OTHER; note = 2-deoxy-2-fluoro ribonucleotide
  modified_base 12: mod_base = OTHER; note = 2-deoxy-2-fluoro ribonucleotide
  modified_base 14: mod_base = OTHER; note = 2-deoxy-2-fluoro ribonucleotide
  modified_base 19: mod_base = OTHER; note = 2-deoxy-2-fluoro ribonucleotide
  modified_base 22: mod_base = OTHER; note = 2-deoxy-2-fluoro ribonucleotide
  modified_base 1..2: mod_base = OTHER; note = phosphorothioate internucleotide linkage
  modified_base 2..3: mod_base = OTHER; note = phosphorothioate internucleotide linkage
  modified_base 22..23: mod_base = OTHER; note = phosphorothioate internucleotide linkage
  modified_base 23..24: mod_base = OTHER; note = phosphorothioate internucleotide linkage
tcgtataacaataaggggctgcctat

SEQ ID NO: 722 - RNA, 26 nt, synthetic construct
  source 1..26: mol_type = other RNA
  modified_base 1: mod_base = OTHER; note = 2'-OMe modified nucleotide
  modified_base 3..5: mod_base = OTHER; note = 2'-OMe modified nucleotide
  modified_base 7..8: mod_base = OTHER; note = 2'-OMe modified nucleotide
  modified_base 10..11: mod_base = OTHER; note = 2'-OMe modified nucleotide
  modified_base 13: mod_base = OTHER; note = 2'-OMe modified nucleotide
  modified_base 15..18: mod_base = OTHER; note = 2'-OMe modified nucleotide
  modified_base 20..21: mod_base = OTHER; note = 2'-OMe modified nucleotide
  modified_base 23..24: mod_base = OTHER; note = 2'-OMe modified nucleotide
  modified_base 26: mod_base = OTHER; note = 2'-OMe modified nucleotide
  modified_base 2: mod_base = OTHER; note = 2-deoxy-2-fluoro ribonucleotide
  modified_base 6: mod_base = OTHER; note = 2-deoxy-2-fluoro ribonucleotide
  modified_base 9: mod_base = OTHER; note = 2-deoxy-2-fluoro ribonucleotide
  modified_base 12: mod_base = OTHER; note = 2-deoxy-2-fluoro ribonucleotide
  modified_base 14: mod_base = OTHER; note = 2-deoxy-2-fluoro ribonucleotide
  modified_base 19: mod_base = OTHER; note = 2-deoxy-2-fluoro ribonucleotide
  modified_base 22: mod_base = OTHER; note = 2-deoxy-2-fluoro ribonucleotide
  modified_base 1..2: mod_base = OTHER; note = phosphorothioate internucleotide linkage
  modified_base 2..3: mod_base = OTHER; note = phosphorothioate internucleotide linkage
  modified_base 22..23: mod_base = OTHER; note = phosphorothioate internucleotide linkage
  modified_base 23..24: mod_base = OTHER; note = phosphorothioate internucleotide linkage
tcgtataacaataaggggctgcctat

SEQ ID NO: 723 - RNA, 17 nt, synthetic construct
  source 1..17: mol_type = other RNA
  modified_base 16..17: mod_base = OTHER; note = 2'-methoxyethyl nucleotide
  modified_base 1: mod_base = OTHER; note = 2'-OMe modified nucleotide
  modified_base 3: mod_base = OTHER; note = 2'-OMe modified nucleotide
  modified_base 5: mod_base = OTHER; note = 2'-OMe modified nucleotide
  modified_base 7: mod_base = OTHER; note = 2'-OMe modified nucleotide
  modified_base 9: mod_base = OTHER; note = 2'-OMe modified nucleotide
  modified_base 11: mod_base = OTHER; note = 2'-OMe modified nucleotide
  modified_base 13: mod_base = OTHER; note = 2'-OMe modified nucleotide
  modified_base 15: mod_base = OTHER; note = 2'-OMe modified nucleotide
  modified_base 2: mod_base = OTHER; note = 2-deoxy-2-fluoro ribonucleotide
  modified_base 4: mod_base = OTHER; note = 2-deoxy-2-fluoro ribonucleotide
  modified_base 6: mod_base = OTHER; note = 2-deoxy-2-fluoro ribonucleotide
  modified_base 8: mod_base = OTHER; note = 2-deoxy-2-fluoro ribonucleotide
  modified_base 10: mod_base = OTHER; note = 2-deoxy-2-fluoro ribonucleotide
  modified_base 12: mod_base = OTHER; note = 2-deoxy-2-fluoro ribonucleotide
  modified_base 14: mod_base = OTHER; note = 2-deoxy-2-fluoro ribonucleotide
  modified_base 1..2: mod_base = OTHER; note = phosphorothioate internucleotide linkage
  modified_base 2..3: mod_base = OTHER; note = phosphorothioate internucleotide linkage
tgtataacaataagggg

SEQ ID NO: 724 - RNA, 17 nt, synthetic construct
  source 1..17: mol_type = other RNA
  modified_base 16..17: mod_base = OTHER; note = 2'-methoxyethyl nucleotide
  modified_base 1: mod_base = OTHER; note = 2'-OMe modified nucleotide
  modified_base 3: mod_base = OTHER; note = 2'-OMe modified nucleotide
  modified_base 5: mod_base = OTHER; note = 2'-OMe modified nucleotide
  modified_base 7: mod_base = OTHER; note = 2'-OMe modified nucleotide
  modified_base 9: mod_base = OTHER; note = 2'-OMe modified nucleotide
  modified_base 11: mod_base = OTHER; note = 2'-OMe modified nucleotide
  modified_base 13: mod_base = OTHER; note = 2'-OMe modified nucleotide
  modified_base 15: mod_base = OTHER; note = 2'-OMe modified nucleotide
  modified_base 2: mod_base = OTHER; note = 2-deoxy-2-fluoro ribonucleotide
  modified_base 4: mod_base = OTHER; note = 2-deoxy-2-fluoro ribonucleotide
  modified_base 6: mod_base = OTHER; note = 2-deoxy-2-fluoro ribonucleotide
  modified_base 8: mod_base = OTHER; note = 2-deoxy-2-fluoro ribonucleotide
  modified_base 10: mod_base = OTHER; note = 2-deoxy-2-fluoro ribonucleotide
  modified_base 12: mod_base = OTHER; note = 2-deoxy-2-fluoro ribonucleotide
  modified_base 14: mod_base = OTHER; note = 2-deoxy-2-fluoro ribonucleotide
  modified_base 1..2: mod_base = OTHER; note = phosphorothioate internucleotide linkage
  modified_base 2..3: mod_base = OTHER; note = phosphorothioate internucleotide linkage
tgtataacaataagggg

SEQ ID NO: 725 - RNA, 17 nt, synthetic construct
  source 1..17: mol_type = other RNA
  modified_base 16..17: mod_base = OTHER; note = 2'-methoxyethyl nucleotide
  modified_base 1: mod_base = OTHER; note = 2'-OMe modified nucleotide
  modified_base 3: mod_base = OTHER; note = 2'-OMe modified nucleotide
  modified_base 5: mod_base = OTHER; note = 2'-OMe modified nucleotide
  modified_base 7: mod_base = OTHER; note = 2'-OMe modified nucleotide
  modified_base 9: mod_base = OTHER; note = 2'-OMe modified nucleotide
  modified_base 11: mod_base = OTHER; note = 2'-OMe modified nucleotide
  modified_base 13: mod_base = OTHER; note = 2'-OMe modified nucleotide
  modified_base 15: mod_base = OTHER; note = 2'-OMe modified nucleotide
  modified_base 2: mod_base = OTHER; note = 2-deoxy-2-fluoro ribonucleotide
  modified_base 4: mod_base = OTHER; note = 2-deoxy-2-fluoro ribonucleotide
  modified_base 6: mod_base = OTHER; note = 2-deoxy-2-fluoro ribonucleotide
  modified_base 8: mod_base = OTHER; note = 2-deoxy-2-fluoro ribonucleotide
  modified_base 10: mod_base = OTHER; note = 2-deoxy-2-fluoro ribonucleotide
  modified_base 12: mod_base = OTHER; note = 2-deoxy-2-fluoro ribonucleotide
  modified_base 14: mod_base = OTHER; note = 2-deoxy-2-fluoro ribonucleotide
  modified_base 1..2: mod_base = OTHER; note = phosphorothioate internucleotide linkage
  modified_base 2..3: mod_base = OTHER; note = phosphorothioate internucleotide linkage
tgtataacaataagggg

SEQ ID NO: 726 - RNA, 17 nt, synthetic construct
  source 1..17: mol_type = other RNA
  modified_base 16..17: mod_base = OTHER; note = 2'-methoxyethyl nucleotide
  modified_base 1: mod_base = OTHER; note = 2'-OMe modified nucleotide
  modified_base 3: mod_base = OTHER; note = 2'-OMe modified nucleotide
  modified_base 5: mod_base = OTHER; note = 2'-OMe modified nucleotide
  modified_base 7: mod_base = OTHER; note = 2'-OMe modified nucleotide
  modified_base 9: mod_base = OTHER; note = 2'-OMe modified nucleotide
  modified_base 11: mod_base = OTHER; note = 2'-OMe modified nucleotide
  modified_base 13: mod_base = OTHER; note = 2'-OMe modified nucleotide
  modified_base 15: mod_base = OTHER; note = 2'-OMe modified nucleotide
  modified_base 2: mod_base = OTHER; note = 2-deoxy-2-fluoro ribonucleotide
  modified_base 4: mod_base = OTHER; note = 2-deoxy-2-fluoro ribonucleotide
  modified_base 6: mod_base = OTHER; note = 2-deoxy-2-fluoro ribonucleotide
  modified_base 8: mod_base = OTHER; note = 2-deoxy-2-fluoro ribonucleotide
  modified_base 10: mod_base = OTHER; note = 2-deoxy-2-fluoro ribonucleotide
  modified_base 12: mod_base = OTHER; note = 2-deoxy-2-fluoro ribonucleotide
  modified_base 14: mod_base = OTHER; note = 2-deoxy-2-fluoro ribonucleotide
  modified_base 1..2: mod_base = OTHER; note = phosphorothioate internucleotide linkage
  modified_base 2..3: mod_base = OTHER; note = phosphorothioate internucleotide linkage
tcgtataacaataaggg

SEQ ID NO: 727 - RNA, 17 nt, synthetic construct
  source 1..17: mol_type = other RNA
  modified_base 16..17: mod_base = OTHER; note = 2'-methoxyethyl nucleotide
  modified_base 1: mod_base = OTHER; note = 2'-OMe modified nucleotide
  modified_base 3: mod_base = OTHER; note = 2'-OMe modified nucleotide
  modified_base 5: mod_base = OTHER; note = 2'-OMe modified nucleotide
  modified_base 7: mod_base = OTHER; note = 2'-OMe modified nucleotide
  modified_base 9: mod_base = OTHER; note = 2'-OMe modified nucleotide
  modified_base 11: mod_base = OTHER; note = 2'-OMe modified nucleotide
  modified_base 13: mod_base = OTHER; note = 2'-OMe modified nucleotide
  modified_base 15: mod_base = OTHER; note = 2'-OMe modified nucleotide
  modified_base 2: mod_base = OTHER; note = 2-deoxy-2-fluoro ribonucleotide
  modified_base 4: mod_base = OTHER; note = 2-deoxy-2-fluoro ribonucleotide
  modified_base 6: mod_base = OTHER; note = 2-deoxy-2-fluoro ribonucleotide
  modified_base 8: mod_base = OTHER; note = 2-deoxy-2-fluoro ribonucleotide
  modified_base 10: mod_base = OTHER; note = 2-deoxy-2-fluoro ribonucleotide
  modified_base 12: mod_base = OTHER; note = 2-deoxy-2-fluoro ribonucleotide
  modified_base 14: mod_base = OTHER; note = 2-deoxy-2-fluoro ribonucleotide
  modified_base 1..2: mod_base = OTHER; note = phosphorothioate internucleotide linkage
  modified_base 2..3: mod_base = OTHER; note = phosphorothioate internucleotide linkage
tcgtataacaataaggg

SEQ ID NO: 728 - RNA, 17 nt, synthetic construct
  source 1..17: mol_type = other RNA
  modified_base 16..17: mod_base = OTHER; note = 2'-methoxyethyl nucleotide
  modified_base 1: mod_base = OTHER; note = 2'-OMe modified nucleotide
  modified_base 3: mod_base = OTHER; note = 2'-OMe modified nucleotide
  modified_base 5: mod_base = OTHER; note = 2'-OMe modified nucleotide
  modified_base 7: mod_base = OTHER; note = 2'-OMe modified nucleotide
  modified_base 9: mod_base = OTHER; note = 2'-OMe modified nucleotide
  modified_base 11: mod_base = OTHER; note = 2'-OMe modified nucleotide
  modified_base 13: mod_base = OTHER; note = 2'-OMe modified nucleotide
  modified_base 15: mod_base = OTHER; note = 2'-OMe modified nucleotide
  modified_base 2: mod_base = OTHER; note = 2-deoxy-2-fluoro ribonucleotide
  modified_base 4: mod_base = OTHER; note = 2-deoxy-2-fluoro ribonucleotide
  modified_base 6: mod_base = OTHER; note = 2-deoxy-2-fluoro ribonucleotide
  modified_base 8: mod_base = OTHER; note = 2-deoxy-2-fluoro ribonucleotide
  modified_base 10: mod_base = OTHER; note = 2-deoxy-2-fluoro ribonucleotide
  modified_base 12: mod_base = OTHER; note = 2-deoxy-2-fluoro ribonucleotide
  modified_base 14: mod_base = OTHER; note = 2-deoxy-2-fluoro ribonucleotide
  modified_base 1..2: mod_base = OTHER; note = phosphorothioate internucleotide linkage
  modified_base 2..3: mod_base = OTHER; note = phosphorothioate internucleotide linkage
tcgtataacaataaggg

SEQ ID NO: 729 - RNA, 17 nt, synthetic construct
  source 1..17: mol_type = other RNA
  modified_base 16..17: mod_base = OTHER; note = 2'-methoxyethyl nucleotide
  modified_base 1: mod_base = OTHER; note = 2'-OMe modified nucleotide
  modified_base 3: mod_base = OTHER; note = 2'-OMe modified nucleotide
  modified_base 5: mod_base = OTHER; note = 2'-OMe modified nucleotide
  modified_base 7: mod_base = OTHER; note = 2'-OMe modified nucleotide
  modified_base 9: mod_base = OTHER; note = 2'-OMe modified nucleotide
  modified_base 11: mod_base = OTHER; note = 2'-OMe modified nucleotide
  modified_base 13: mod_base = OTHER; note = 2'-OMe modified nucleotide
  modified_base 15: mod_base = OTHER; note = 2'-OMe modified nucleotide
  modified_base 2: mod_base = OTHER; note = 2-deoxy-2-fluoro ribonucleotide
  modified_base 4: mod_base = OTHER; note = 2-deoxy-2-fluoro ribonucleotide
  modified_base 6: mod_base = OTHER; note = 2-deoxy-2-fluoro ribonucleotide
  modified_base 8: mod_base = OTHER; note = 2-deoxy-2-fluoro ribonucleotide
  modified_base 10: mod_base = OTHER; note = 2-deoxy-2-fluoro ribonucleotide
  modified_base 12: mod_base = OTHER; note = 2-deoxy-2-fluoro ribonucleotide
  modified_base 14: mod_base = OTHER; note = 2-deoxy-2-fluoro ribonucleotide
  modified_base 1..2: mod_base = OTHER; note = phosphorothioate internucleotide linkage
  modified_base 2..3: mod_base = OTHER; note = phosphorothioate internucleotide linkage
  modified_base 17: mod_base = OTHER; note = Thymine
tgagaatgagcctcgat

SEQ ID NO: 730 - RNA, 17 nt, synthetic construct
  source 1..17: mol_type = other RNA
  modified_base 16..17: mod_base = OTHER; note = 2'-methoxyethyl nucleotide
  modified_base 1: mod_base = OTHER; note = 2'-OMe modified nucleotide
  modified_base 3: mod_base = OTHER; note = 2'-OMe modified nucleotide
  modified_base 5: mod_base = OTHER; note = 2'-OMe modified nucleotide
  modified_base 7: mod_base = OTHER; note = 2'-OMe modified nucleotide
  modified_base 9: mod_base = OTHER; note = 2'-OMe modified nucleotide
  modified_base 11: mod_base = OTHER; note = 2'-OMe modified nucleotide
  modified_base 13: mod_base = OTHER; note = 2'-OMe modified nucleotide
  modified_base 15: mod_base = OTHER; note = 2'-OMe modified nucleotide
  modified_base 2: mod_base = OTHER; note = 2-deoxy-2-fluoro ribonucleotide
  modified_base 4: mod_base = OTHER; note = 2-deoxy-2-fluoro ribonucleotide
  modified_base 6: mod_base = OTHER; note = 2-deoxy-2-fluoro ribonucleotide
  modified_base 8: mod_base = OTHER; note = 2-deoxy-2-fluoro ribonucleotide
  modified_base 10: mod_base = OTHER; note = 2-deoxy-2-fluoro ribonucleotide
  modified_base 12: mod_base = OTHER; note = 2-deoxy-2-fluoro ribonucleotide
  modified_base 14: mod_base = OTHER; note = 2-deoxy-2-fluoro ribonucleotide
  modified_base 1..2: mod_base = OTHER; note = phosphorothioate internucleotide linkage
  modified_base 2..3: mod_base = OTHER; note = phosphorothioate internucleotide linkage
  modified_base 17: mod_base = OTHER; note = Thymine
tgagaatgagcctcgat

SEQ ID NO: 731 - RNA, 17 nt, synthetic construct
  source 1..17: mol_type = other RNA
  modified_base 16..17: mod_base = OTHER; note = 2'-methoxyethyl nucleotide
  modified_base 1: mod_base = OTHER; note = 2'-OMe modified nucleotide
  modified_base 3: mod_base = OTHER; note = 2'-OMe modified nucleotide
  modified_base 5: mod_base = OTHER; note = 2'-OMe modified nucleotide
  modified_base 7: mod_base = OTHER; note = 2'-OMe modified nucleotide
  modified_base 9: mod_base = OTHER; note = 2'-OMe modified nucleotide
  modified_base 11: mod_base = OTHER; note = 2'-OMe modified nucleotide
  modified_base 13: mod_base = OTHER; note = 2'-OMe modified nucleotide
  modified_base 15: mod_base = OTHER; note = 2'-OMe modified nucleotide
  modified_base 2: mod_base = OTHER; note = 2-deoxy-2-fluoro ribonucleotide
  modified_base 4: mod_base = OTHER; note = 2-deoxy-2-fluoro ribonucleotide
  modified_base 6: mod_base = OTHER; note = 2-deoxy-2-fluoro ribonucleotide
  modified_base 8: mod_base = OTHER; note = 2-deoxy-2-fluoro ribonucleotide
  modified_base 10: mod_base = OTHER; note = 2-deoxy-2-fluoro ribonucleotide
  modified_base 12: mod_base = OTHER; note = 2-deoxy-2-fluoro ribonucleotide
  modified_base 14: mod_base = OTHER; note = 2-deoxy-2-fluoro ribonucleotide
  modified_base 1..2: mod_base = OTHER; note = phosphorothioate internucleotide linkage
  modified_base 2..3: mod_base = OTHER; note = phosphorothioate internucleotide linkage
  modified_base 17: mod_base = OTHER; note = Thymine
tgagaatgagcctcgat

SEQ ID NO: 732 - RNA, 17 nt, synthetic construct
  source 1..17: mol_type = other RNA
  modified_base 16..17: mod_base = OTHER; note = 2'-methoxyethyl nucleotide
  modified_base 1: mod_base = OTHER; note = 2'-OMe modified nucleotide
  modified_base 3: mod_base = OTHER; note = 2'-OMe modified nucleotide
  modified_base 5: mod_base = OTHER; note = 2'-OMe modified nucleotide
  modified_base 7: mod_base = OTHER; note = 2'-OMe modified nucleotide
  modified_base 9: mod_base = OTHER; note = 2'-OMe modified nucleotide
  modified_base 11: mod_base = OTHER; note = 2'-OMe modified nucleotide
  modified_base 13: mod_base = OTHER; note = 2'-OMe modified nucleotide
  modified_base 15: mod_base = OTHER; note = 2'-OMe modified nucleotide
  modified_base 2: mod_base = OTHER; note = 2-deoxy-2-fluoro ribonucleotide
  modified_base 4: mod_base = OTHER; note = 2-deoxy-2-fluoro ribonucleotide
  modified_base 6: mod_base = OTHER; note = 2-deoxy-2-fluoro ribonucleotide
  modified_base 8: mod_base = OTHER; note = 2-deoxy-2-fluoro ribonucleotide
  modified_base 10: mod_base = OTHER; note = 2-deoxy-2-fluoro ribonucleotide
  modified_base 12: mod_base = OTHER; note = 2-deoxy-2-fluoro ribonucleotide
  modified_base 14: mod_base = OTHER; note = 2-deoxy-2-fluoro ribonucleotide
  modified_base 1..2: mod_base = OTHER; note = phosphorothioate internucleotide linkage
  modified_base 2..3: mod_base = OTHER; note = phosphorothioate internucleotide linkage
  modified_base 16..17: mod_base = OTHER; note = Thymine
tgacacctgattctgtt

SEQ ID NO: 733 - RNA, 17 nt, synthetic construct
  source 1..17: mol_type = other RNA
  modified_base 16..17: mod_base = OTHER; note = 2'-methoxyethyl nucleotide
  modified_base 1: mod_base = OTHER; note = 2'-OMe modified nucleotide
  modified_base 3: mod_base = OTHER; note = 2'-OMe modified nucleotide
  modified_base 5: mod_base = OTHER; note = 2'-OMe modified nucleotide
  modified_base 7: mod_base = OTHER; note = 2'-OMe modified nucleotide
  modified_base 9: mod_base = OTHER; note = 2'-OMe modified nucleotide
  modified_base 11: mod_base = OTHER; note = 2'-OMe modified nucleotide
  modified_base 13: mod_base = OTHER; note = 2'-OMe modified nucleotide
  modified_base 15: mod_base = OTHER; note = 2'-OMe modified nucleotide
  modified_base 2: mod_base = OTHER; note = 2-deoxy-2-fluoro ribonucleotide
  modified_base 4: mod_base = OTHER; note = 2-deoxy-2-fluoro ribonucleotide
  modified_base 6: mod_base = OTHER; note = 2-deoxy-2-fluoro ribonucleotide
  modified_base 8: mod_base = OTHER; note = 2-deoxy-2-fluoro ribonucleotide
  modified_base 10: mod_base = OTHER; note = 2-deoxy-2-fluoro ribonucleotide
  modified_base 12: mod_base = OTHER; note = 2-deoxy-2-fluoro ribonucleotide
  modified_base 14: mod_base = OTHER; note = 2-deoxy-2-fluoro ribonucleotide
  modified_base 1..2: mod_base = OTHER; note = phosphorothioate internucleotide linkage
  modified_base 2..3: mod_base = OTHER; note = phosphorothioate internucleotide linkage
  modified_base 16..17: mod_base = OTHER; note = Thymine
tgacacctgattctgtt

SEQ ID NO: 734 - RNA, 17 nt, synthetic construct
  source 1..17: mol_type = other RNA
  modified_base 16..17: mod_base = OTHER; note = 2'-methoxyethyl nucleotide
  modified_base 1: mod_base = OTHER; note = 2'-OMe modified nucleotide
  modified_base 3: mod_base = OTHER; note = 2'-OMe modified nucleotide
  modified_base 5: mod_base = OTHER; note = 2'-OMe modified nucleotide
  modified_base 7: mod_base = OTHER; note = 2'-OMe modified nucleotide
  modified_base 9: mod_base = OTHER; note = 2'-OMe modified nucleotide
  modified_base 11: mod_base = OTHER; note = 2'-OMe modified nucleotide
  modified_base 13: mod_base = OTHER; note = 2'-OMe modified nucleotide
  modified_base 15: mod_base = OTHER; note = 2'-OMe modified nucleotide
  modified_base 2: mod_base = OTHER; note = 2-deoxy-2-fluoro ribonucleotide
  modified_base 4: mod_base = OTHER; note = 2-deoxy-2-fluoro ribonucleotide
  modified_base 6: mod_base = OTHER; note = 2-deoxy-2-fluoro ribonucleotide
  modified_base 8: mod_base = OTHER; note = 2-deoxy-2-fluoro ribonucleotide
  modified_base 10: mod_base = OTHER; note = 2-deoxy-2-fluoro ribonucleotide
  modified_base 12: mod_base = OTHER; note = 2-deoxy-2-fluoro ribonucleotide
  modified_base 14: mod_base = OTHER; note = 2-deoxy-2-fluoro ribonucleotide
  modified_base 1..2: mod_base = OTHER; note = phosphorothioate internucleotide linkage
  modified_base 2..3: mod_base = OTHER; note = phosphorothioate internucleotide linkage
  modified_base 16..17: mod_base = OTHER; note = Thymine
tgacacctgattctgtt

SEQ ID NO: 735 - RNA, 26 nt, synthetic construct
  source 1..26: mol_type = other RNA
  modified_base 1: mod_base = OTHER; note = 2'-deoxy nucleotide
  modified_base 2: mod_base = OTHER; note = 2'-OMe modified nucleotide
  modified_base 4: mod_base = OTHER; note = 2'-OMe modified nucleotide
  modified_base 6: mod_base = OTHER; note = 2'-OMe modified nucleotide
  modified_base 8..12: mod_base = OTHER; note = 2'-OMe modified nucleotide
  modified_base 14: mod_base = OTHER; note = 2'-OMe modified nucleotide
  modified_base 16: mod_base = OTHER; note = 2'-OMe modified nucleotide
  modified_base 18: mod_base = OTHER; note = 2'-OMe modified nucleotide
  modified_base 20: mod_base = OTHER; note = 2'-OMe modified nucleotide
  modified_base 22: mod_base = OTHER; note = 2'-OMe modified nucleotide
  modified_base 24..26: mod_base = OTHER; note = 2'-OMe modified nucleotide
  modified_base 3: mod_base = OTHER; note = 2-deoxy-2-fluoro ribonucleotide
  modified_base 5: mod_base = OTHER; note = 2-deoxy-2-fluoro ribonucleotide
  modified_base 7: mod_base = OTHER; note = 2-deoxy-2-fluoro ribonucleotide
  modified_base 13: mod_base = OTHER; note = 2-deoxy-2-fluoro ribonucleotide
  modified_base 15: mod_base = OTHER; note = 2-deoxy-2-fluoro ribonucleotide
  modified_base 17: mod_base = OTHER; note = 2-deoxy-2-fluoro ribonucleotide
  modified_base 19: mod_base = OTHER; note = 2-deoxy-2-fluoro ribonucleotide
  modified_base 21: mod_base = OTHER; note = 2-deoxy-2-fluoro ribonucleotide
  modified_base 23: mod_base = OTHER; note = 2-deoxy-2-fluoro ribonucleotide
  modified_base 2..3: mod_base = OTHER; note = phosphorothioate internucleotide linkage
  modified_base 3..4: mod_base = OTHER; note = phosphorothioate internucleotide linkage
  modified_base 23..24: mod_base = OTHER; note = phosphorothioate internucleotide linkage
  modified_base 24..25: mod_base = OTHER; note = phosphorothioate internucleotide linkage
  modified_base 1: mod_base = OTHER; note = Thymine
ttcgtataacaataaggggctgccta

SEQ ID NO: 736 - RNA, 26 nt, synthetic construct
  source 1..26: mol_type = other RNA
  modified_base 1: mod_base = OTHER; note = 2'-OMe modified nucleotide
  modified_base 3: mod_base = OTHER; note = 2'-OMe modified nucleotide
  modified_base 5: mod_base = OTHER; note = 2'-OMe modified nucleotide
  modified_base 7: mod_base = OTHER; note = 2'-OMe modified nucleotide
  modified_base 9..13: mod_base = OTHER; note = 2'-OMe modified nucleotide
  modified_base 15: mod_base = OTHER; note = 2'-OMe modified nucleotide
  modified_base 17: mod_base = OTHER; note = 2'-OMe modified nucleotide
  modified_base 19: mod_base = OTHER; note = 2'-OMe modified nucleotide
  modified_base 21: mod_base = OTHER; note = 2'-OMe modified nucleotide
  modified_base 23: mod_base = OTHER; note = 2'-OMe modified nucleotide
  modified_base 25..26: mod_base = OTHER; note = 2'-OMe modified nucleotide
  modified_base 4: mod_base = OTHER; note = 2-deoxy-2-fluoro ribonucleotide
  modified_base 6: mod_base = OTHER; note = 2-deoxy-2-fluoro ribonucleotide
  modified_base 8: mod_base = OTHER; note = 2-deoxy-2-fluoro ribonucleotide
  modified_base 14: mod_base = OTHER; note = 2-deoxy-2-fluoro ribonucleotide
  modified_base 16: mod_base = OTHER; note = 2-deoxy-2-fluoro ribonucleotide
  modified_base 18: mod_base = OTHER; note = 2-deoxy-2-fluoro ribonucleotide
  modified_base 20: mod_base = OTHER; note = 2-deoxy-2-fluoro ribonucleotide
  modified_base 22: mod_base = OTHER; note = 2-deoxy-2-fluoro ribonucleotide
  modified_base 24: mod_base = OTHER; note = 2-deoxy-2-fluoro ribonucleotide
  modified_base 3..4: mod_base = OTHER; note = phosphorothioate internucleotide linkage
  modified_base 4..5: mod_base = OTHER; note = phosphorothioate internucleotide linkage
  modified_base 24..25: mod_base = OTHER; note = phosphorothioate internucleotide linkage
  modified_base 25..26: mod_base = OTHER; note = phosphorothioate internucleotide linkage
tatcgtataacaataaggggctgcct

SEQ ID NO: 737 - RNA, 26 nt, synthetic construct
  source 1..26: mol_type = other RNA
  modified_base 1: mod_base = OTHER; note = 2'-deoxy nucleotide
  modified_base 2: mod_base = OTHER; note = 2'-OMe modified nucleotide
  modified_base 4: mod_base = OTHER; note = 2'-OMe modified nucleotide
  modified_base 6: mod_base = OTHER; note = 2'-OMe modified nucleotide
  modified_base 8..12: mod_base = OTHER; note = 2'-OMe modified nucleotide
  modified_base 14: mod_base = OTHER; note = 2'-OMe modified nucleotide
  modified_base 16: mod_base = OTHER; note = 2'-OMe modified nucleotide
  modified_base 18: mod_base = OTHER; note = 2'-OMe modified nucleotide
  modified_base 20: mod_base = OTHER; note = 2'-OMe modified nucleotide
  modified_base 22: mod_base = OTHER; note = 2'-OMe modified nucleotide
  modified_base 24..26: mod_base = OTHER; note = 2'-OMe modified nucleotide
  modified_base 3: mod_base = OTHER; note = 2-deoxy-2-fluoro ribonucleotide
  modified_base 5: mod_base = OTHER; note = 2-deoxy-2-fluoro ribonucleotide
  modified_base 7: mod_base = OTHER; note = 2-deoxy-2-fluoro ribonucleotide
  modified_base 13: mod_base = OTHER; note = 2-deoxy-2-fluoro ribonucleotide
  modified_base 15: mod_base = OTHER; note = 2-deoxy-2-fluoro ribonucleotide
  modified_base 17: mod_base = OTHER; note = 2-deoxy-2-fluoro ribonucleotide
  modified_base 19: mod_base = OTHER; note = 2-deoxy-2-fluoro ribonucleotide
  modified_base 21: mod_base = OTHER; note = 2-deoxy-2-fluoro ribonucleotide
  modified_base 23: mod_base = OTHER; note = 2-deoxy-2-fluoro ribonucleotide
  modified_base 2..3: mod_base = OTHER; note = phosphorothioate internucleotide linkage
  modified_base 3..4: mod_base = OTHER; note = phosphorothioate internucleotide linkage
  modified_base 23..24: mod_base = OTHER; note = phosphorothioate internucleotide linkage
  modified_base 24..25: mod_base = OTHER; note = phosphorothioate internucleotide linkage
  modified_base 1: mod_base = OTHER; note = Thymine
tccgtataacaataaggggctgccta

SEQ ID NO: 738 - RNA, 26 nt, synthetic construct
  source 1..26: mol_type = other RNA
  modified_base 1: mod_base = OTHER; note = 2'-OMe modified nucleotide
  modified_base 3: mod_base = OTHER; note = 2'-OMe modified nucleotide
  modified_base 5: mod_base = OTHER; note = 2'-OMe modified nucleotide
  modified_base 7: mod_base = OTHER; note = 2'-OMe modified nucleotide
  modified_base 9..13: mod_base = OTHER; note = 2'-OMe modified nucleotide
  modified_base 15: mod_base = OTHER; note = 2'-OMe modified nucleotide
  modified_base 17: mod_base = OTHER; note = 2'-OMe modified nucleotide
  modified_base 19: mod_base = OTHER; note = 2'-OMe modified nucleotide
  modified_base 21: mod_base = OTHER; note = 2'-OMe modified nucleotide
  modified_base 23: mod_base = OTHER; note = 2'-OMe modified nucleotide
  modified_base 25..26: mod_base = OTHER; note = 2'-OMe modified nucleotide
  modified_base 4: mod_base = OTHER; note = 2-deoxy-2-fluoro ribonucleotide
  modified_base 6: mod_base = OTHER; note = 2-deoxy-2-fluoro ribonucleotide
  modified_base 8: mod_base = OTHER; note = 2-deoxy-2-fluoro ribonucleotide
  modified_base 14: mod_base = OTHER; note = 2-deoxy-2-fluoro ribonucleotide
  modified_base 16: mod_base = OTHER; note = 2-deoxy-2-fluoro ribonucleotide
  modified_base 18: mod_base = OTHER; note = 2-deoxy-2-fluoro ribonucleotide
  modified_base 20: mod_base = OTHER; note = 2-deoxy-2-fluoro ribonucleotide
  modified_base 22: mod_base = OTHER; note = 2-deoxy-2-fluoro ribonucleotide
  modified_base 24: mod_base = OTHER; note = 2-deoxy-2-fluoro ribonucleotide
  modified_base 3..4: mod_base = OTHER; note = phosphorothioate internucleotide linkage
  modified_base 4..5: mod_base = OTHER; note = phosphorothioate internucleotide linkage
  modified_base 24..25: mod_base = OTHER; note = phosphorothioate internucleotide linkage
  modified_base 25..26: mod_base = OTHER; note = phosphorothioate internucleotide linkage
ctccgtataacaataaggggctgcct

SEQ ID NO: 739 - RNA, 26 nt, synthetic construct
  source 1..26: mol_type = other RNA
  modified_base 1: mod_base = OTHER; note = 2'-deoxy nucleotide
  modified_base 2: mod_base = OTHER; note = 2'-OMe modified nucleotide
  modified_base 4: mod_base = OTHER; note = 2'-OMe modified nucleotide
  modified_base 6: mod_base = OTHER; note = 2'-OMe modified nucleotide
  modified_base 8: mod_base = OTHER; note = 2'-OMe modified nucleotide
  modified_base 10: mod_base = OTHER; note = 2'-OMe modified nucleotide
  modified_base 12..14: mod_base = OTHER; note = 2'-OMe modified nucleotide
  modified_base 16: mod_base = OTHER; note = 2'-OMe modified nucleotide
  modified_base 18: mod_base = OTHER; note = 2'-OMe modified nucleotide
  modified_base 20: mod_base = OTHER; note = 2'-OMe modified nucleotide
  modified_base 22..26: mod_base = OTHER; note = 2'-OMe modified nucleotide
  modified_base 3: mod_base = OTHER; note = 2-deoxy-2-fluoro ribonucleotide
  modified_base 5: mod_base = OTHER; note = 2-deoxy-2-fluoro ribonucleotide
  modified_base 7: mod_base = OTHER; note = 2-deoxy-2-fluoro ribonucleotide
  modified_base 9: mod_base = OTHER; note = 2-deoxy-2-fluoro ribonucleotide
  modified_base 11: mod_base = OTHER; note = 2-deoxy-2-fluoro ribonucleotide
  modified_base 15: mod_base = OTHER; note = 2-deoxy-2-fluoro ribonucleotide
  modified_base 17: mod_base = OTHER; note = 2-deoxy-2-fluoro ribonucleotide
  modified_base 19: mod_base = OTHER; note = 2-deoxy-2-fluoro ribonucleotide
  modified_base 21: mod_base = OTHER; note = 2-deoxy-2-fluoro ribonucleotide
  modified_base 2..3: mod_base = OTHER; note = phosphorothioate internucleotide linkage
  modified_base 3..4: mod_base = OTHER; note = phosphorothioate internucleotide linkage
  modified_base 23..24: mod_base = OTHER; note = phosphorothioate internucleotide linkage
  modified_base 24..25: mod_base = OTHER; note = phosphorothioate internucleotide linkage
  modified_base 1: mod_base = OTHER; note = Thymine
ttgagaatgagcctcgataactctta

SEQ ID NO: 740 - RNA, 26 nt, synthetic construct
  source 1..26: mol_type = other RNA
  modified_base 1: mod_base = OTHER; note = 2'-OMe modified nucleotide
  modified_base 3: mod_base = OTHER; note = 2'-OMe modified nucleotide
  modified_base 5: mod_base = OTHER; note = 2'-OMe modified nucleotide
  modified_base 7: mod_base = OTHER; note = 2'-OMe modified nucleotide
  modified_base 9: mod_base = OTHER; note = 2'-OMe modified nucleotide
  modified_base 11: mod_base = OTHER; note = 2'-OMe modified nucleotide
  modified_base 13..15: mod_base = OTHER; note = 2'-OMe modified nucleotide
  modified_base 17: mod_base = OTHER; note = 2'-OMe modified nucleotide
  modified_base 19: mod_base = OTHER; note = 2'-OMe modified nucleotide
  modified_base 21: mod_base = OTHER; note = 2'-OMe modified nucleotide
  modified_base 23..26: mod_base = OTHER; note = 2'-OMe modified nucleotide
  modified_base 4: mod_base = OTHER; note = 2-deoxy-2-fluoro ribonucleotide
  modified_base 6: mod_base = OTHER; note = 2-deoxy-2-fluoro ribonucleotide
  modified_base 8: mod_base = OTHER; note = 2-deoxy-2-fluoro ribonucleotide
  modified_base 10: mod_base = OTHER; note = 2-deoxy-2-fluoro ribonucleotide
  modified_base 12: mod_base = OTHER; note = 2-deoxy-2-fluoro ribonucleotide
  modified_base 16: mod_base = OTHER; note = 2-deoxy-2-fluoro ribonucleotide
  modified_base 18: mod_base = OTHER; note = 2-deoxy-2-fluoro ribonucleotide
  modified_base 20: mod_base = OTHER; note = 2-deoxy-2-fluoro ribonucleotide
  modified_base 22: mod_base = OTHER; note = 2-deoxy-2-fluoro ribonucleotide
  modified_base 3..4: mod_base = OTHER; note = phosphorothioate internucleotide linkage
  modified_base 4..5: mod_base = OTHER; note = phosphorothioate internucleotide linkage
  modified_base 24..25: mod_base = OTHER; note = phosphorothioate internucleotide linkage
  modified_base 25..26: mod_base = OTHER; note = phosphorothioate internucleotide linkage
tatgagaatgagcctcgataactctt

SEQ ID NO: 741 - RNA, 26 nt, synthetic construct
  source 1..26: mol_type = other RNA
  modified_base 1: mod_base = OTHER; note = 2'-deoxy nucleotide
  modified_base 2: mod_base = OTHER; note = 2'-OMe modified nucleotide
  modified_base 4: mod_base = OTHER; note = 2'-OMe modified nucleotide
  modified_base 6: mod_base = OTHER; note = 2'-OMe modified nucleotide
  modified_base 8: mod_base = OTHER; note = 2'-OMe modified nucleotide
  modified_base 10: mod_base = OTHER; note = 2'-OMe modified nucleotide
  modified_base 12..14: mod_base = OTHER; note = 2'-OMe modified nucleotide
  modified_base 16: mod_base = OTHER; note = 2'-OMe modified nucleotide
  modified_base 18: mod_base = OTHER; note = 2'-OMe modified nucleotide
  modified_base 20: mod_base = OTHER; note = 2'-OMe modified nucleotide
  modified_base 22..26: mod_base = OTHER; note = 2'-OMe modified nucleotide
  modified_base 3: mod_base = OTHER; note = 2-deoxy-2-fluoro ribonucleotide
  modified_base 5: mod_base = OTHER; note = 2-deoxy-2-fluoro ribonucleotide
  modified_base 7: mod_base = OTHER; note = 2-deoxy-2-fluoro ribonucleotide
  modified_base 9: mod_base = OTHER; note = 2-deoxy-2-fluoro ribonucleotide
  modified_base 11: mod_base = OTHER; note = 2-deoxy-2-fluoro ribonucleotide
  modified_base 15: mod_base = OTHER; note = 2-deoxy-2-fluoro ribonucleotide
  modified_base 17: mod_base = OTHER; note = 2-deoxy-2-fluoro ribonucleotide
  modified_base 19: mod_base = OTHER; note = 2-deoxy-2-fluoro ribonucleotide
  modified_base 21: mod_base = OTHER; note = 2-deoxy-2-fluoro ribonucleotide
  modified_base 2..3: mod_base = OTHER; note = phosphorothioate internucleotide linkage
  modified_base 3..4: mod_base = OTHER; note = phosphorothioate internucleotide linkage
  modified_base 23..24: mod_base = OTHER; note = phosphorothioate internucleotide linkage
  modified_base 24..25: mod_base = OTHER; note = phosphorothioate internucleotide linkage
  modified_base 1: mod_base = OTHER; note = Thymine
tggagaatgagcctcgataactctta

SEQ ID NO: 742 - RNA, 26 nt, synthetic construct
  source 1..26: mol_type = other RNA
  modified_base 1: mod_base = OTHER; note = 2'-OMe modified nucleotide
  modified_base 3: mod_base = OTHER; note = 2'-OMe modified nucleotide
  modified_base 5: mod_base = OTHER; note = 2'-OMe modified nucleotide
  modified_base 7: mod_base = OTHER; note = 2'-OMe modified nucleotide
  modified_base 9: mod_base = OTHER; note = 2'-OMe modified nucleotide
  modified_base 11: mod_base = OTHER; note = 2'-OMe modified nucleotide
  modified_base 13..15: mod_base = OTHER; note = 2'-OMe modified nucleotide
  modified_base 17: mod_base = OTHER; note = 2'-OMe modified nucleotide
  modified_base 19: mod_base = OTHER; note = 2'-OMe modified nucleotide
  modified_base 21: mod_base = OTHER; note = 2'-OMe modified nucleotide
  modified_base 23..26: mod_base = OTHER; note = 2'-OMe modified nucleotide
  modified_base 4: mod_base = OTHER; note = 2-deoxy-2-fluoro ribonucleotide
  modified_base 6: mod_base = OTHER; note = 2-deoxy-2-fluoro ribonucleotide
  modified_base 8: mod_base = OTHER; note = 2-deoxy-2-fluoro ribonucleotide
  modified_base 10: mod_base = OTHER; note = 2-deoxy-2-fluoro ribonucleotide
  modified_base 12: mod_base = OTHER; note = 2-deoxy-2-fluoro ribonucleotide
  modified_base 16: mod_base = OTHER; note = 2-deoxy-2-fluoro ribonucleotide
  modified_base 18: mod_base = OTHER; note = 2-deoxy-2-fluoro ribonucleotide
  modified_base 20: mod_base = OTHER; note = 2-deoxy-2-fluoro ribonucleotide
  modified_base 22: mod_base = OTHER; note = 2-deoxy-2-fluoro ribonucleotide
  modified_base 3..4: mod_base = OTHER; note = phosphorothioate internucleotide linkage
  modified_base 4..5: mod_base = OTHER; note = phosphorothioate internucleotide linkage
  modified_base 24..25: mod_base = OTHER; note = phosphorothioate internucleotide linkage
  modified_base 25..26: mod_base = OTHER; note = phosphorothioate internucleotide linkage
gtggagaatgagcctcgataactctt

SEQ ID NO: 743 - RNA, 26 nt, synthetic construct
  source 1..26: mol_type = other RNA
  modified_base 1: mod_base = OTHER; note = 2'-deoxy nucleotide
  modified_base 2: mod_base = OTHER; note = 2'-OMe modified nucleotide
  modified_base 4..8: mod_base = OTHER; note = 2'-OMe modified nucleotide
  modified_base 10: mod_base = OTHER; note = 2'-OMe modified nucleotide
  modified_base 12..14: mod_base = OTHER; note = 2'-OMe modified nucleotide
  modified_base 16..26: mod_base = OTHER; note = 2'-OMe modified nucleotide
  modified_base 3: mod_base = OTHER; note = 2-deoxy-2-fluoro ribonucleotide
  modified_base 9: mod_base = OTHER; note = 2-deoxy-2-fluoro ribonucleotide
  modified_base 11: mod_base = OTHER; note = 2-deoxy-2-fluoro ribonucleotide
  modified_base 15: mod_base = OTHER; note = 2-deoxy-2-fluoro ribonucleotide
  modified_base 2..3: mod_base = OTHER; note = phosphorothioate internucleotide linkage
  modified_base 3..4: mod_base = OTHER; note = phosphorothioate internucleotide linkage
  modified_base 23..24: mod_base = OTHER; note = phosphorothioate internucleotide linkage
  modified_base 24..25: mod_base = OTHER; note = phosphorothioate internucleotide linkage
  modified_base 1: mod_base = OTHER; note = Thymine
ttgagaatgagcctcgataactctta

SEQ ID NO: 744 - RNA, 26 nt, synthetic construct
  source 1..26: mol_type = other RNA
  modified_base 1: mod_base = OTHER; note = 2'-OMe modified nucleotide
  modified_base 3: mod_base = OTHER; note = 2'-OMe modified nucleotide
  modified_base 5..9: mod_base = OTHER; note = 2'-OMe modified nucleotide
  modified_base 11: mod_base = OTHER; note = 2'-OMe modified nucleotide
  modified_base 13..15: mod_base = OTHER; note = 2'-OMe modified nucleotide
  modified_base 17..26: mod_base = OTHER; note = 2'-OMe modified nucleotide
  modified_base 4: mod_base = OTHER; note = 2-deoxy-2-fluoro ribonucleotide
  modified_base 10: mod_base = OTHER; note = 2-deoxy-2-fluoro ribonucleotide
  modified_base 12: mod_base = OTHER; note = 2-deoxy-2-fluoro ribonucleotide
  modified_base 16: mod_base = OTHER; note = 2-deoxy-2-fluoro ribonucleotide
  modified_base 3..4: mod_base = OTHER; note = phosphorothioate internucleotide linkage
  modified_base 4..5: mod_base = OTHER; note = phosphorothioate internucleotide linkage
  modified_base 24..25: mod_base = OTHER; note = phosphorothioate internucleotide linkage
  modified_base 25..26: mod_base = OTHER; note = phosphorothioate internucleotide linkage
tatgagaatgagcctcgataactctt

SEQ ID NO: 745 - RNA, 26 nt, synthetic construct
  source 1..26: mol_type = other RNA
  modified_base 1: mod_base = OTHER; note = 2'-deoxy nucleotide
  modified_base 2: mod_base = OTHER; note = 2'-OMe modified nucleotide
  modified_base 4..8: mod_base = OTHER; note = 2'-OMe modified nucleotide
  modified_base 10: mod_base = OTHER; note = 2'-OMe modified nucleotide
  modified_base 12..14: mod_base = OTHER; note = 2'-OMe modified nucleotide
  modified_base 16..26: mod_base = OTHER; note = 2'-OMe modified nucleotide
  modified_base 3: mod_base = OTHER; note = 2-deoxy-2-fluoro ribonucleotide
  modified_base 9: mod_base = OTHER; note = 2-deoxy-2-fluoro ribonucleotide
  modified_base 11: mod_base = OTHER; note = 2-deoxy-2-fluoro ribonucleotide
  modified_base 15: mod_base = OTHER; note = 2-deoxy-2-fluoro ribonucleotide
  modified_base 2..3: mod_base = OTHER; note = phosphorothioate internucleotide linkage
  modified_base 3..4: mod_base = OTHER; note = phosphorothioate internucleotide linkage
  modified_base 23..24: mod_base = OTHER; note = phosphorothioate internucleotide linkage
  modified_base 24..25: mod_base = OTHER; note = phosphorothioate internucleotide linkage
  modified_base 1: mod_base = OTHER; note = Thymine
tggagaatgagcctcgataactctta

SEQ ID NO: 746 - RNA, 26 nt, synthetic construct
  source 1..26: mol_type = other RNA
  modified_base 1: mod_base = OTHER; note = 2'-OMe modified nucleotide
  modified_base 3: mod_base = OTHER; note = 2'-OMe modified nucleotide
  modified_base 5..9: mod_base = OTHER; note = 2'-OMe modified nucleotide
  modified_base 11: mod_base = OTHER; note = 2'-OMe modified nucleotide
  modified_base 13..15: mod_base = OTHER; note = 2'-OMe modified nucleotide
  modified_base 17..26: mod_base = OTHER; note = 2'-OMe modified nucleotide
  modified_base 4: mod_base = OTHER; note = 2-deoxy-2-fluoro ribonucleotide
  modified_base 10: mod_base = OTHER; note = 2-deoxy-2-fluoro ribonucleotide
  modified_base 12: mod_base = OTHER; note = 2-deoxy-2-fluoro ribonucleotide
  modified_base 16: mod_base = OTHER; note = 2-deoxy-2-fluoro ribonucleotide
  modified_base 3..4: mod_base = OTHER; note = phosphorothioate internucleotide linkage
  modified_base 4..5: mod_base = OTHER; note = phosphorothioate internucleotide linkage
  modified_base 24..25: mod_base = OTHER; note = phosphorothioate internucleotide linkage
  modified_base 25..26: mod_base = OTHER; note = phosphorothioate internucleotide linkage
gtggagaatgagcctcgataactctt

SEQ ID NO: 747 - RNA, 21 nt, synthetic construct
  source 1..21: mol_type = other RNA
  modified_base 1: mod_base = OTHER; note = 2'-OMe modified nucleotide
  modified_base 3: mod_base = OTHER; note = 2'-OMe modified nucleotide
  modified_base 5: mod_base = OTHER; note = 2'-OMe modified nucleotide
  modified_base 7..11: mod_base = OTHER; note = 2'-OMe modified nucleotide
  modified_base 13: mod_base = OTHER; note = 2'-OMe modified nucleotide
  modified_base 15: mod_base = OTHER; note = 2'-OMe modified nucleotide
  modified_base 17: mod_base = OTHER; note = 2'-OMe modified nucleotide
  modified_base 19..21: mod_base = OTHER; note = 2'-OMe modified nucleotide
  modified_base 2: mod_base = OTHER; note = 2-deoxy-2-fluoro ribonucleotide
  modified_base 4: mod_base = OTHER; note = 2-deoxy-2-fluoro ribonucleotide
  modified_base 6: mod_base = OTHER; note = 2-deoxy-2-fluoro ribonucleotide
  modified_base 12: mod_base = OTHER; note = 2-deoxy-2-fluoro ribonucleotide
  modified_base 14: mod_base = OTHER; note = 2-deoxy-2-fluoro ribonucleotide
  modified_base 16: mod_base = OTHER; note = 2-deoxy-2-fluoro ribonucleotide
  modified_base 18: mod_base = OTHER; note = 2-deoxy-2-fluoro ribonucleotide
  modified_base 1..2: mod_base = OTHER; note = phosphorothioate internucleotide linkage
  modified_base 2..3: mod_base = OTHER; note = phosphorothioate internucleotide linkage
  modified_base 3..4: mod_base = OTHER; note = phosphorothioate internucleotide linkage
  modified_base 20..21: mod_base = OTHER; note = phosphorothioate internucleotide linkage
tcgtataacaataaggggctt

SEQ ID NO: 748 - RNA, 21 nt, synthetic construct
  source 1..21: mol_type = other RNA
  modified_base 1: mod_base = OTHER; note = 2'-OMe modified nucleotide
  modified_base 3: mod_base = OTHER; note = 2'-OMe modified nucleotide
  modified_base 5: mod_base = OTHER; note = 2'-OMe modified nucleotide
  modified_base 7: mod_base = OTHER; note = 2'-OMe modified nucleotide
  modified_base 9: mod_base = OTHER; note = 2'-OMe modified nucleotide
  modified_base 11..13: mod_base = OTHER; note = 2'-OMe modified nucleotide
  modified_base 15: mod_base = OTHER; note = 2'-OMe modified nucleotide
  modified_base 17: mod_base = OTHER; note = 2'-OMe modified nucleotide
  modified_base 19..21: mod_base = OTHER; note = 2'-OMe modified nucleotide
  modified_base 2: mod_base = OTHER; note = 2-deoxy-2-fluoro ribonucleotide
  modified_base 4: mod_base = OTHER; note = 2-deoxy-2-fluoro ribonucleotide
  modified_base 6: mod_base = OTHER; note = 2-deoxy-2-fluoro ribonucleotide
  modified_base 8: mod_base = OTHER; note = 2-deoxy-2-fluoro ribonucleotide
  modified_base 10: mod_base = OTHER; note = 2-deoxy-2-fluoro ribonucleotide
  modified_base 14: mod_base = OTHER; note = 2-deoxy-2-fluoro ribonucleotide
  modified_base 16: mod_base = OTHER; note = 2-deoxy-2-fluoro ribonucleotide
  modified_base 18: mod_base = OTHER; note = 2-deoxy-2-fluoro ribonucleotide
  modified_base 1..2: mod_base = OTHER; note = phosphorothioate internucleotide linkage
  modified_base 2..3: mod_base = OTHER; note = phosphorothioate internucleotide linkage
  modified_base 3..4: mod_base = OTHER; note = phosphorothioate internucleotide linkage
  modified_base 20..21: mod_base = OTHER; note = phosphorothioate internucleotide linkage
tgagaatgagcctcgataatt

SEQ ID NO: 749 - RNA, 17 nt, synthetic construct
  source 1..17: mol_type = other RNA
  modified_base 16..17: mod_base = OTHER; note = 2'-methoxyethyl nucleotide
  modified_base 1: mod_base = OTHER; note = 2'-OMe modified nucleotide
  modified_base 3: mod_base = OTHER; note = 2'-OMe modified nucleotide
  modified_base 5: mod_base = OTHER; note = 2'-OMe modified nucleotide
  modified_base 7: mod_base = OTHER; note = 2'-OMe modified nucleotide
  modified_base 9: mod_base = OTHER; note = 2'-OMe modified nucleotide
  modified_base 11: mod_base = OTHER; note = 2'-OMe modified nucleotide
  modified_base 13: mod_base = OTHER; note = 2'-OMe modified nucleotide
  modified_base 15: mod_base = OTHER; note = 2'-OMe modified nucleotide
  modified_base 2: mod_base = OTHER; note = 2-deoxy-2-fluoro ribonucleotide
  modified_base 4: mod_base = OTHER; note = 2-deoxy-2-fluoro ribonucleotide
  modified_base 6: mod_base = OTHER; note = 2-deoxy-2-fluoro ribonucleotide
  modified_base 8: mod_base = OTHER; note = 2-deoxy-2-fluoro ribonucleotide
  modified_base 10: mod_base = OTHER; note = 2-deoxy-2-fluoro ribonucleotide
  modified_base 12: mod_base = OTHER; note = 2-deoxy-2-fluoro ribonucleotide
  modified_base 14: mod_base = OTHER; note = 2-deoxy-2-fluoro ribonucleotide
  modified_base 1..2: mod_base = OTHER; note = phosphorothioate internucleotide linkage
  modified_base 2..3: mod_base = OTHER; note = phosphorothioate internucleotide linkage
tgtataacaataagggg

SEQ ID NO: 750 - RNA, 17 nt, synthetic construct
  source 1..17: mol_type = other RNA
  modified_base 16..17: mod_base = OTHER; note = 2'-methoxyethyl nucleotide
  modified_base 1: mod_base = OTHER; note = 2'-OMe modified nucleotide
  modified_base 3: mod_base = OTHER; note = 2'-OMe modified nucleotide
  modified_base 5: mod_base = OTHER; note = 2'-OMe modified nucleotide
  modified_base 7: mod_base = OTHER; note = 2'-OMe modified nucleotide
  modified_base 9: mod_base = OTHER; note = 2'-OMe modified nucleotide
  modified_base 11: mod_base = OTHER; note = 2'-OMe modified nucleotide
  modified_base 13: mod_base = OTHER; note = 2'-OMe modified nucleotide
  modified_base 15: mod_base = OTHER; note = 2'-OMe modified nucleotide
  modified_base 2: mod_base = OTHER; note = 2-deoxy-2-fluoro ribonucleotide
  modified_base 4: mod_base = OTHER; note = 2-deoxy-2-fluoro ribonucleotide
  modified_base 6: mod_base = OTHER; note = 2-deoxy-2-fluoro ribonucleotide
  modified_base 8: mod_base = OTHER; note = 2-deoxy-2-fluoro ribonucleotide
  modified_base 10: mod_base = OTHER; note = 2-deoxy-2-fluoro ribonucleotide
  modified_base 12: mod_base = OTHER; note = 2-deoxy-2-fluoro ribonucleotide
  modified_base 14: mod_base = OTHER; note = 2-deoxy-2-fluoro ribonucleotide
  modified_base 1..2: mod_base = OTHER; note = phosphorothioate internucleotide linkage
  modified_base 2..3: mod_base = OTHER; note = phosphorothioate internucleotide linkage
tcgtataacaataaggg

SEQ ID NO: 751 - RNA, 17 nt, synthetic construct
  source 1..17: mol_type = other RNA
  modified_base 16..17: mod_base = OTHER; note = 2'-methoxyethyl nucleotide
  modified_base 1: mod_base = OTHER; note = 2'-OMe modified nucleotide
  modified_base 3: mod_base = OTHER; note = 2'-OMe modified nucleotide
  modified_base 5: mod_base = OTHER; note = 2'-OMe modified nucleotide
  modified_base 7: mod_base = OTHER; note = 2'-OMe modified nucleotide
  modified_base 9: mod_base = OTHER; note = 2'-OMe modified nucleotide
  modified_base 11: mod_base = OTHER; note = 2'-OMe modified nucleotide
  modified_base 13: mod_base = OTHER; note = 2'-OMe modified nucleotide
  modified_base 15: mod_base = OTHER; note = 2'-OMe modified nucleotide
  modified_base 2: mod_base = OTHER; note = 2-deoxy-2-fluoro ribonucleotide
  modified_base 4: mod_base = OTHER; note = 2-deoxy-2-fluoro ribonucleotide
  modified_base 6: mod_base = OTHER; note = 2-deoxy-2-fluoro ribonucleotide
  modified_base 8: mod_base = OTHER; note = 2-deoxy-2-fluoro ribonucleotide
  modified_base 10: mod_base = OTHER; note = 2-deoxy-2-fluoro ribonucleotide
  modified_base 12: mod_base = OTHER; note = 2-deoxy-2-fluoro ribonucleotide
  modified_base 14: mod_base = OTHER; note = 2-deoxy-2-fluoro ribonucleotide
  modified_base 1..2: mod_base = OTHER; note = phosphorothioate internucleotide linkage
  modified_base 2..3: mod_base = OTHER; note = phosphorothioate internucleotide linkage
  modified_base 17: mod_base = OTHER; note = Thymine
tgagaatgagcctcgat

SEQ ID NO: 752 - RNA, 17 nt, synthetic construct
  source 1..17: mol_type = other RNA
  modified_base 16..17: mod_base = OTHER; note = 2'-methoxyethyl nucleotide
  modified_base 1: mod_base = OTHER; note = 2'-OMe modified nucleotide
  modified_base 3: mod_base = OTHER; note = 2'-OMe modified nucleotide
  modified_base 5: mod_base = OTHER; note = 2'-OMe modified nucleotide
  modified_base 7: mod_base = OTHER; note = 2'-OMe modified nucleotide
  modified_base 9: mod_base = OTHER; note = 2'-OMe modified nucleotide
  modified_base 11: mod_base = OTHER; note = 2'-OMe modified nucleotide
  modified_base 13: mod_base = OTHER; note = 2'-OMe modified nucleotide
  modified_base 15: mod_base = OTHER; note = 2'-OMe modified nucleotide
  modified_base 2: mod_base = OTHER; note = 2-deoxy-2-fluoro ribonucleotide
  modified_base 4: mod_base = OTHER; note = 2-deoxy-2-fluoro ribonucleotide
  modified_base 6: mod_base = OTHER; note = 2-deoxy-2-fluoro ribonucleotide
  modified_base 8: mod_base = OTHER; note = 2-deoxy-2-fluoro ribonucleotide
  modified_base 10: mod_base = OTHER; note = 2-deoxy-2-fluoro ribonucleotide
  modified_base 12: mod_base = OTHER; note = 2-deoxy-2-fluoro ribonucleotide
  modified_base 14: mod_base = OTHER; note = 2-deoxy-2-fluoro ribonucleotide
  modified_base 1..2: mod_base = OTHER; note = phosphorothioate internucleotide linkage
  modified_base 2..3: mod_base = OTHER; note = phosphorothioate internucleotide linkage
  modified_base 16..17: mod_base = OTHER; note = Thymine
tgacacctgattctgtt

SEQ ID NO: 753 - RNA, 21 nt, synthetic construct
  source 1..21: mol_type = other RNA
  modified_base 1: mod_base = OTHER; note = cyclopropyl phosphonate
  modified_base 3: mod_base = OTHER; note = 2'-OMe modified nucleotide
  modified_base 5: mod_base = OTHER; note = 2'-OMe modified nucleotide
  modified_base 7: mod_base = OTHER; note = 2'-OMe modified nucleotide
  modified_base 11..13: mod_base = OTHER; note = 2'-OMe modified nucleotide
  modified_base 15: mod_base = OTHER; note = 2'-OMe modified nucleotide
  modified_base 17: mod_base = OTHER; note = 2'-OMe modified nucleotide
  modified_base 19..21: mod_base = OTHER; note = 2'-OMe modified nucleotide
  modified_base 1: mod_base = OTHER; note = 2'-methoxyethyl nucleotide
  modified_base 2: mod_base = OTHER; note = 2-deoxy-2-fluoro ribonucleotide
  modified_base 4: mod_base = OTHER; note = 2-deoxy-2-fluoro ribonucleotide
  modified_base 6: mod_base = OTHER; note = 2-deoxy-2-fluoro ribonucleotide
  modified_base 8..10: mod_base = OTHER; note = 2-deoxy-2-fluoro ribonucleotide
  modified_base 14: mod_base = OTHER; note = 2-deoxy-2-fluoro ribonucleotide
  modified_base 16: mod_base = OTHER; note = 2-deoxy-2-fluoro ribonucleotide
  modified_base 18: mod_base = OTHER; note = 2-deoxy-2-fluoro ribonucleotide
  modified_base 1..2: mod_base = OTHER; note = phosphorothioate internucleotide linkage
  modified_base 2..3: mod_base = OTHER; note = phosphorothioate internucleotide linkage
  modified_base 3..4: mod_base = OTHER; note = phosphorothioate internucleotide linkage
  modified_base 20..21: mod_base = OTHER; note = phosphorothioate internucleotide linkage
  modified_base 1: mod_base = OTHER; note = Thymine
tcgtataacaataaggggctt

SEQ ID NO: 754 - RNA, 26 nt, synthetic construct
  source 1..26: mol_type = other RNA
  modified_base 1: mod_base = OTHER; note = 2'-OMe modified nucleotide
  modified_base 3: mod_base = OTHER; note = 2'-OMe modified nucleotide
  modified_base 5: mod_base = OTHER; note = 2'-OMe modified nucleotide
  modified_base 7: mod_base = OTHER; note = 2'-OMe modified nucleotide
  modified_base 9: mod_base = OTHER; note = 2'-OMe modified nucleotide
  modified_base 11..13: mod_base = OTHER; note = 2'-OMe modified nucleotide
  modified_base 15: mod_base = OTHER; note = 2'-OMe modified nucleotide
  modified_base 17: mod_base = OTHER; note = 2'-OMe modified nucleotide
  modified_base 19..21: mod_base = OTHER; note = 2'-OMe modified nucleotide
  modified_base 2: mod_base = OTHER; note = 2-deoxy-2-fluoro ribonucleotide
  modified_base 4: mod_base = OTHER; note = 2-deoxy-2-fluoro ribonucleotide
  modified_base 6: mod_base = OTHER; note = 2-deoxy-2-fluoro ribonucleotide
  modified_base 8: mod_base = OTHER; note = 2-deoxy-2-fluoro ribonucleotide
  modified_base 10: mod_base = OTHER; note = 2-deoxy-2-fluoro ribonucleotide
  modified_base 14: mod_base = OTHER; note = 2-deoxy-2-fluoro ribonucleotide
  modified_base 16: mod_base = OTHER; note = 2-deoxy-2-fluoro ribonucleotide
  modified_base 18: mod_base = OTHER; note = 2-deoxy-2-fluoro ribonucleotide
  modified_base 1..2: mod_base = OTHER; note = phosphorothioate internucleotide linkage
  modified_base 2..3: mod_base = OTHER; note = phosphorothioate internucleotide linkage
  modified_base 3..4: mod_base = OTHER; note = phosphorothioate internucleotide linkage
  modified_base 20..21: mod_base = OTHER; note = phosphorothioate internucleotide linkage
tgagaatgagcctcgataattatata

SEQ ID NO: 755 - RNA, 26 nt, synthetic construct
  source 1..26: mol_type = other RNA
  modified_base 1: mod_base = OTHER; note = 2'-OMe modified nucleotide
  modified_base 3: mod_base = OTHER; note = 2'-OMe modified nucleotide
  modified_base 5: mod_base = OTHER; note = 2'-OMe modified nucleotide
  modified_base 7..11: mod_base = OTHER; note = 2'-OMe modified nucleotide
  modified_base 13: mod_base = OTHER; note = 2'-OMe modified nucleotide
  modified_base 15: mod_base = OTHER; note = 2'-OMe modified nucleotide
  modified_base 17: mod_base = OTHER; note = 2'-OMe modified nucleotide
  modified_base 19: mod_base = OTHER; note = 2'-OMe modified nucleotide
  modified_base 21: mod_base = OTHER; note = 2'-OMe modified nucleotide
  modified_base 23..24: mod_base = OTHER; note = 2'-OMe modified nucleotide
  modified_base 26: mod_base = OTHER; note = 2'-OMe modified nucleotide
  modified_base 2: mod_base = OTHER; note = 2-deoxy-2-fluoro ribonucleotide
  modified_base 4: mod_base = OTHER; note = 2-deoxy-2-fluoro ribonucleotide
  modified_base 6: mod_base = OTHER; note = 2-deoxy-2-fluoro ribonucleotide
  modified_base 12: mod_base = OTHER; note = 2-deoxy-2-fluoro ribonucleotide
  modified_base 14: mod_base = OTHER; note = 2-deoxy-2-fluoro ribonucleotide
  modified_base 16: mod_base = OTHER; note = 2-deoxy-2-fluoro ribonucleotide
  modified_base 18: mod_base = OTHER; note = 2-deoxy-2-fluoro ribonucleotide
  modified_base 20: mod_base = OTHER; note = 2-deoxy-2-fluoro ribonucleotide
  modified_base 22: mod_base = OTHER; note = 2-deoxy-2-fluoro ribonucleotide
  modified_base 1..2: mod_base = OTHER; note = phosphorothioate internucleotide linkage
  modified_base 2..3: mod_base = OTHER; note = phosphorothioate internucleotide linkage
  modified_base 21..22: mod_base = OTHER; note = phosphorothioate internucleotide linkage
  modified_base 22..23: mod_base = OTHER; note = phosphorothioate internucleotide linkage
tcgtataacaataaggggctgcctat

SEQ ID NO: 756 - RNA, 26 nt, synthetic construct
  source 1..26: mol_type = other RNA
  modified_base 1: mod_base = OTHER; note = 2'-OMe modified nucleotide
  modified_base 3: mod_base = OTHER; note = 2'-OMe modified nucleotide
  modified_base 5: mod_base = OTHER; note = 2'-OMe modified nucleotide
  modified_base 7..11: mod_base = OTHER; note = 2'-OMe modified nucleotide
  modified_base 13: mod_base = OTHER; note = 2'-OMe modified nucleotide
  modified_base 15: mod_base = OTHER; note = 2'-OMe modified nucleotide
  modified_base 17: mod_base = OTHER; note = 2'-OMe modified nucleotide
  modified_base 19: mod_base = OTHER; note = 2'-OMe modified nucleotide
  modified_base 21: mod_base = OTHER; note = 2'-OMe modified nucleotide
  modified_base 23..24: mod_base = OTHER; note = 2'-OMe modified nucleotide
  modified_base 26: mod_base = OTHER; note = 2'-OMe modified nucleotide
  modified_base 2: mod_base = OTHER; note = 2-deoxy-2-fluoro ribonucleotide
  modified_base 4: mod_base = OTHER; note = 2-deoxy-2-fluoro ribonucleotide
  modified_base 6: mod_base = OTHER; note = 2-deoxy-2-fluoro ribonucleotide
  modified_base 12: mod_base = OTHER; note = 2-deoxy-2-fluoro ribonucleotide
  modified_base 14: mod_base = OTHER; note = 2-deoxy-2-fluoro ribonucleotide
  modified_base 16: mod_base = OTHER; note = 2-deoxy-2-fluoro ribonucleotide
  modified_base 18: mod_base = OTHER; note = 2-deoxy-2-fluoro ribonucleotide
  modified_base 20: mod_base = OTHER; note = 2-deoxy-2-fluoro ribonucleotide
  modified_base 22: mod_base = OTHER; note = 2-deoxy-2-fluoro ribonucleotide
  modified_base 1..2: mod_base = OTHER; note = phosphorothioate internucleotide linkage
  modified_base 2..3: mod_base = OTHER; note = phosphorothioate internucleotide linkage
  modified_base 21..22: mod_base = OTHER; note = phosphorothioate internucleotide linkage
tcgtataacaataaggggctgcctat

SEQ ID NO: 757 - RNA, 26 nt, synthetic construct
  source 1..26: mol_type = other RNA
  modified_base 1: mod_base = OTHER; note = 2'-OMe modified nucleotide
  modified_base 3: mod_base = OTHER; note = 2'-OMe modified nucleotide
  modified_base 5: mod_base = OTHER; note = 2'-OMe modified nucleotide
  modified_base 7: mod_base = OTHER; note = 2'-OMe modified nucleotide
  modified_base 9: mod_base = OTHER; note = 2'-OMe modified nucleotide
  modified_base 11: mod_base = OTHER; note = 2'-OMe modified nucleotide
  modified_base 12: mod_base = OTHER; note = 2'-OMe modified nucleotide
  modified_base 13: mod_base = OTHER; note = 2'-OMe modified nucleotide
  modified_base 15: mod_base = OTHER; note = 2'-OMe modified nucleotide
  modified_base 17: mod_base = OTHER; note = 2'-OMe modified nucleotide
  modified_base 19: mod_base = OTHER; note = 2'-OMe modified nucleotide
  modified_base 21: mod_base = OTHER; note = 2'-OMe modified nucleotide
  modified_base 22: mod_base = OTHER; note = 2'-OMe modified nucleotide
  modified_base 23: mod_base = OTHER; note = 2'-OMe modified nucleotide
  modified_base 24: mod_base = OTHER; note = 2'-OMe modified nucleotide
  modified_base 26: mod_base = OTHER; note = 2'-OMe modified nucleotide
  modified_base 2: mod_base = OTHER; note = 2-deoxy-2-fluoro ribonucleotide
  modified_base 4: mod_base = OTHER; note = 2-deoxy-2-fluoro ribonucleotide
  modified_base 6: mod_base = OTHER; note = 2-deoxy-2-fluoro ribonucleotide
  modified_base 8: mod_base = OTHER; note = 2-deoxy-2-fluoro ribonucleotide
  modified_base 10: mod_base = OTHER; note = 2-deoxy-2-fluoro ribonucleotide
  modified_base 14: mod_base = OTHER; note = 2-deoxy-2-fluoro ribonucleotide
  modified_base 16: mod_base = OTHER; note = 2-deoxy-2-fluoro ribonucleotide
  modified_base 18: mod_base = OTHER; note = 2-deoxy-2-fluoro ribonucleotide
  modified_base 20: mod_base = OTHER; note = 2-deoxy-2-fluoro ribonucleotide
  modified_base 1..2: mod_base = OTHER; note = phosphorothioate internucleotide linkage
  modified_base 2..3: mod_base = OTHER; note = phosphorothioate internucleotide linkage
  modified_base 21..22: mod_base = OTHER; note = phosphorothioate internucleotide linkage
  modified_base 22..23: mod_base = OTHER; note = phosphorothioate internucleotide linkage
tgagaatgagcctcgataactcttat

SEQ ID NO: 758 - RNA, 26 nt, synthetic construct
  source 1..26: mol_type = other RNA
  modified_base 1: mod_base = OTHER; note = 2'-OMe modified nucleotide
  modified_base 3: mod_base = OTHER; note = 2'-OMe modified nucleotide
  modified_base 5: mod_base = OTHER; note = 2'-OMe modified nucleotide
  modified_base 7: mod_base = OTHER; note = 2'-OMe modified nucleotide
  modified_base 9: mod_base = OTHER; note = 2'-OMe modified nucleotide
  modified_base 11: mod_base = OTHER; note = 2'-OMe modified nucleotide
  modified_base 12: mod_base = OTHER; note = 2'-OMe modified nucleotide
  modified_base 13: mod_base = OTHER; note = 2'-OMe modified nucleotide
  modified_base 15: mod_base = OTHER; note = 2'-OMe modified nucleotide
  modified_base 17: mod_base = OTHER; note = 2'-OMe modified nucleotide
  modified_base 19: mod_base = OTHER; note = 2'-OMe modified nucleotide
  modified_base 21: mod_base = OTHER; note = 2'-OMe modified nucleotide
  modified_base 22: mod_base = OTHER; note = 2'-OMe modified nucleotide
  modified_base 23: mod_base = OTHER; note = 2'-OMe modified nucleotide
  modified_base 24: mod_base = OTHER; note = 2'-OMe modified nucleotide
  modified_base 26: mod_base = OTHER; note = 2'-OMe modified nucleotide
  modified_base 2: mod_base = OTHER; note = 2-deoxy-2-fluoro ribonucleotide
  modified_base 4: mod_base = OTHER; note = 2-deoxy-2-fluoro ribonucleotide
  modified_base 6: mod_base = OTHER; note = 2-deoxy-2-fluoro ribonucleotide
  modified_base 8: mod_base = OTHER; note = 2-deoxy-2-fluoro ribonucleotide
  modified_base 10: mod_base = OTHER; note = 2-deoxy-2-fluoro ribonucleotide
  modified_base 14: mod_base = OTHER; note = 2-deoxy-2-fluoro ribonucleotide
  modified_base 16: mod_base = OTHER; note = 2-deoxy-2-fluoro ribonucleotide
  modified_base 18: mod_base = OTHER; note = 2-deoxy-2-fluoro ribonucleotide
  modified_base 20: mod_base = OTHER; note = 2-deoxy-2-fluoro ribonucleotide
  modified_base 1..2: mod_base = OTHER; note = phosphorothioate internucleotide linkage
  modified_base 2..3: mod_base = OTHER; note = phosphorothioate internucleotide linkage
  modified_base 21..22: mod_base = OTHER; note = phosphorothioate internucleotide linkage
tgagaatgagcctcgataactcttat

SEQ ID NO: 759 - RNA, 24 nt, synthetic construct
  source 1..24: mol_type = other RNA
  modified_base 1: mod_base = OTHER; note = 2'-OMe modified nucleotide
  modified_base 3: mod_base = OTHER; note = 2'-OMe modified nucleotide
  modified_base 5: mod_base = OTHER; note = 2'-OMe modified nucleotide
  modified_base 7: mod_base = OTHER; note = 2'-OMe modified nucleotide
  modified_base 11..13: mod_base = OTHER; note = 2'-OMe modified nucleotide
  modified_base 15: mod_base = OTHER; note = 2'-OMe modified nucleotide
  modified_base 17: mod_base = OTHER; note = 2'-OMe modified nucleotide
  modified_base 19: mod_base = OTHER; note = 2'-OMe modified nucleotide
  modified_base 21..24: mod_base = OTHER; note = 2'-OMe modified nucleotide
  modified_base 2: mod_base = OTHER; note = 2-deoxy-2-fluoro ribonucleotide
  modified_base 4: mod_base = OTHER; note = 2-deoxy-2-fluoro ribonucleotide
  modified_base 6: mod_base = OTHER; note = 2-deoxy-2-fluoro ribonucleotide
  modified_base 8..10: mod_base = OTHER; note = 2-deoxy-2-fluoro ribonucleotide
  modified_base 14: mod_base = OTHER; note = 2-deoxy-2-fluoro ribonucleotide
  modified_base 16: mod_base = OTHER; note = 2-deoxy-2-fluoro ribonucleotide
  modified_base 18: mod_base = OTHER; note = 2-deoxy-2-fluoro ribonucleotide
  modified_base 20: mod_base = OTHER; note = 2-deoxy-2-fluoro ribonucleotide
  modified_base 1..2: mod_base = OTHER; note = phosphorothioate internucleotide linkage
  modified_base 2..3: mod_base = OTHER; note = phosphorothioate internucleotide linkage
  modified_base 3..4: mod_base = OTHER; note = phosphorothioate internucleotide linkage
  modified_base 22..23: mod_base = OTHER; note = phosphorothioate internucleotide linkage
  modified_base 23..24: mod_base = OTHER; note = phosphorothioate internucleotide linkage
tcgtataacaataaggggctgctt

SEQ ID NO: 760 - RNA, 21 nt, synthetic construct
  source 1..21: mol_type = other RNA
  modified_base 1: mod_base = OTHER; note = 2'-OMe modified nucleotide
  modified_base 3: mod_base = OTHER; note = 2'-OMe modified nucleotide
  modified_base 5: mod_base = OTHER; note = 2'-OMe modified nucleotide
  modified_base 7: mod_base = OTHER; note = 2'-OMe modified nucleotide
  modified_base 11..15: mod_base = OTHER; note = 2'-OMe modified nucleotide
  modified_base 17: mod_base = OTHER; note = 2'-OMe modified nucleotide
  modified_base 19..21: mod_base = OTHER; note = 2'-OMe modified nucleotide
  modified_base 2: mod_base = OTHER; note = 2-deoxy-2-fluoro ribonucleotide
  modified_base 4: mod_base = OTHER; note = 2-deoxy-2-fluoro ribonucleotide
  modified_base 6: mod_base = OTHER; note = 2-deoxy-2-fluoro ribonucleotide
  modified_base 8..10: mod_base = OTHER; note = 2-deoxy-2-fluoro ribonucleotide
  modified_base 16: mod_base = OTHER; note = 2-deoxy-2-fluoro ribonucleotide
  modified_base 18: mod_base = OTHER; note = 2-deoxy-2-fluoro ribonucleotide
  modified_base 1..2: mod_base = OTHER; note = phosphorothioate internucleotide linkage
  modified_base 2..3: mod_base = OTHER; note = phosphorothioate internucleotide linkage
  modified_base 3..4: mod_base = OTHER; note = phosphorothioate internucleotide linkage
  modified_base 20..21: mod_base = OTHER; note = phosphorothioate internucleotide linkage
tcgtataacaataaggggctt

SEQ ID NO: 761 - RNA, 21 nt, synthetic construct
  source 1..21: mol_type = other RNA
  modified_base 1: mod_base = OTHER; note = 2'-OMe modified nucleotide
  modified_base 3: mod_base = OTHER; note = 2'-OMe modified nucleotide
  modified_base 5: mod_base = OTHER; note = 2'-OMe modified nucleotide
  modified_base 7: mod_base = OTHER; note = 2'-OMe modified nucleotide
  modified_base 11: mod_base = OTHER; note = 2'-OMe modified nucleotide
  modified_base 13..15: mod_base = OTHER; note = 2'-OMe modified nucleotide
  modified_base 17: mod_base = OTHER; note = 2'-OMe modified nucleotide
  modified_base 19..21: mod_base = OTHER; note = 2'-OMe modified nucleotide
  modified_base 2: mod_base = OTHER; note = 2-deoxy-2-fluoro ribonucleotide
  modified_base 4: mod_base = OTHER; note = 2-deoxy-2-fluoro ribonucleotide
  modified_base 6: mod_base = OTHER; note = 2-deoxy-2-fluoro ribonucleotide
  modified_base 8..10: mod_base = OTHER; note = 2-deoxy-2-fluoro ribonucleotide
  modified_base 12: mod_base = OTHER; note = 2-deoxy-2-fluoro ribonucleotide
  modified_base 16: mod_base = OTHER; note = 2-deoxy-2-fluoro ribonucleotide
  modified_base 18: mod_base = OTHER; note = 2-deoxy-2-fluoro ribonucleotide
  modified_base 1..2: mod_base = OTHER; note = phosphorothioate internucleotide linkage
  modified_base 2..3: mod_base = OTHER; note = phosphorothioate internucleotide linkage
  modified_base 3..4: mod_base = OTHER; note = phosphorothioate internucleotide linkage
  modified_base 20..21: mod_base = OTHER; note = phosphorothioate internucleotide linkage
tcgtataacaataaggggctt

SEQ ID NO: 762 - RNA, 23 nt, synthetic construct
  source 1..23: mol_type = other RNA
  modified_base 1: mod_base = OTHER; note = 2'-OMe modified nucleotide
  modified_base 3: mod_base = OTHER; note = 2'-OMe modified nucleotide
  modified_base 5: mod_base = OTHER; note = 2'-OMe modified nucleotide
  modified_base 7..11: mod_base = OTHER; note = 2'-OMe modified nucleotide
  modified_base 13: mod_base = OTHER; note = 2'-OMe modified nucleotide
  modified_base 15: mod_base = OTHER; note = 2'-OMe modified nucleotide
  modified_base 17: mod_base = OTHER; note = 2'-OMe modified nucleotide
  modified_base 19: mod_base = OTHER; note = 2'-OMe modified nucleotide
  modified_base 21: mod_base = OTHER; note = 2'-OMe modified nucleotide
  modified_base 23: mod_base = OTHER; note = 2'-OMe modified nucleotide
  modified_base 2: mod_base = OTHER; note = 2-deoxy-2-fluoro ribonucleotide
  modified_base 4: mod_base = OTHER; note = 2-deoxy-2-fluoro ribonucleotide
  modified_base 6: mod_base = OTHER; note = 2-deoxy-2-fluoro ribonucleotide
  modified_base 12: mod_base = OTHER; note = 2-deoxy-2-fluoro ribonucleotide
  modified_base 14: mod_base = OTHER; note = 2-deoxy-2-fluoro ribonucleotide
  modified_base 16: mod_base = OTHER; note = 2-deoxy-2-fluoro ribonucleotide
  modified_base 18: mod_base = OTHER; note = 2-deoxy-2-fluoro ribonucleotide
  modified_base 20: mod_base = OTHER; note = 2-deoxy-2-fluoro ribonucleotide
  modified_base 22: mod_base = OTHER; note = 2-deoxy-2-fluoro ribonucleotide
  modified_base 1..2: mod_base = OTHER; note = phosphorothioate internucleotide linkage
  modified_base 2..3: mod_base = OTHER; note = phosphorothioate internucleotide linkage
  modified_base 21..22: mod_base = OTHER; note = phosphorothioate internucleotide linkage
  modified_base 22..23: mod_base = OTHER; note = phosphorothioate internucleotide linkage
tcgtataacaataaggggctgcc

SEQ ID NO: 763 - RNA, 24 nt, synthetic construct
  source 1..24: mol_type = other RNA
  modified_base 1: mod_base = OTHER; note = 2'-deoxy nucleotide
  modified_base 2: mod_base = OTHER; note = 2'-OMe modified nucleotide
  modified_base 4: mod_base = OTHER; note = 2'-OMe modified nucleotide
  modified_base 6: mod_base = OTHER; note = 2'-OMe modified nucleotide
  modified_base 8..12: mod_base = OTHER; note = 2'-OMe modified nucleotide
  modified_base 14: mod_base = OTHER; note = 2'-OMe modified nucleotide
  modified_base 16: mod_base = OTHER; note = 2'-OMe modified nucleotide
  modified_base 18: mod_base = OTHER; note = 2'-OMe modified nucleotide
  modified_base 20: mod_base = OTHER; note = 2'-OMe modified nucleotide
  modified_base 22: mod_base = OTHER; note = 2'-OMe modified nucleotide
  modified_base 24: mod_base = OTHER; note = 2'-OMe modified nucleotide
  modified_base 3: mod_base = OTHER; note = 2-deoxy-2-fluoro ribonucleotide
  modified_base 5: mod_base = OTHER; note = 2-deoxy-2-fluoro ribonucleotide
  modified_base 7: mod_base = OTHER; note = 2-deoxy-2-fluoro ribonucleotide
  modified_base 13: mod_base = OTHER; note = 2-deoxy-2-fluoro ribonucleotide
  modified_base 15: mod_base = OTHER; note = 2-deoxy-2-fluoro ribonucleotide
  modified_base 17: mod_base = OTHER; note = 2-deoxy-2-fluoro ribonucleotide
  modified_base 19: mod_base = OTHER; note = 2-deoxy-2-fluoro ribonucleotide
  modified_base 21: mod_base = OTHER; note = 2-deoxy-2-fluoro ribonucleotide
  modified_base 23: mod_base = OTHER; note = 2-deoxy-2-fluoro ribonucleotide
  modified_base 2..3: mod_base = OTHER; note = phosphorothioate internucleotide linkage
  modified_base 3..4: mod_base = OTHER; note = phosphorothioate internucleotide linkage
  modified_base 22..23: mod_base = OTHER; note = phosphorothioate internucleotide linkage
  modified_base 23..24: mod_base = OTHER; note = phosphorothioate internucleotide linkage
  modified_base 1: mod_base = OTHER; note = Thymine
ttcgtataacaataaggggctgcc

SEQ ID NO: 764 - RNA, 24 nt, synthetic construct
  source 1..24: mol_type = other RNA
  modified_base 1: mod_base = OTHER; note = 2'-deoxy nucleotide
  modified_base 2: mod_base = OTHER; note = 2'-OMe modified nucleotide
  modified_base 4: mod_base = OTHER; note = 2'-OMe modified nucleotide
  modified_base 6: mod_base = OTHER; note = 2'-OMe modified nucleotide
  modified_base 8..12: mod_base = OTHER; note = 2'-OMe modified nucleotide
  modified_base 14: mod_base = OTHER; note = 2'-OMe modified nucleotide
  modified_base 16: mod_base = OTHER; note = 2'-OMe modified nucleotide
  modified_base 18: mod_base = OTHER; note = 2'-OMe modified nucleotide
  modified_base 20: mod_base = OTHER; note = 2'-OMe modified nucleotide
  modified_base 22..24: mod_base = OTHER; note = 2'-OMe modified nucleotide
  modified_base 3: mod_base = OTHER; note = 2-deoxy-2-fluoro ribonucleotide
  modified_base 5: mod_base = OTHER; note = 2-deoxy-2-fluoro ribonucleotide
  modified_base 7: mod_base = OTHER; note = 2-deoxy-2-fluoro ribonucleotide
  modified_base 13: mod_base = OTHER; note = 2-deoxy-2-fluoro ribonucleotide
  modified_base 15: mod_base = OTHER; note = 2-deoxy-2-fluoro ribonucleotide
  modified_base 17: mod_base = OTHER; note = 2-deoxy-2-fluoro ribonucleotide
  modified_base 19: mod_base = OTHER; note = 2-deoxy-2-fluoro ribonucleotide
  modified_base 21: mod_base = OTHER; note = 2-deoxy-2-fluoro ribonucleotide
  modified_base 2..3: mod_base = OTHER; note = phosphorothioate internucleotide linkage
  modified_base 3..4: mod_base = OTHER; note = phosphorothioate internucleotide linkage
  modified_base 22..23: mod_base = OTHER; note = phosphorothioate internucleotide linkage
  modified_base 23..24: mod_base = OTHER; note = phosphorothioate internucleotide linkage
  modified_base 1: mod_base = OTHER; note = Thymine
ttcgtataacaataaggggctgcc

SEQ ID NO: 765 - RNA, 24 nt, synthetic construct
  source 1..24: mol_type = other RNA
  modified_base 1: mod_base = OTHER; note = 2'-deoxy nucleotide
  modified_base 2: mod_base = OTHER; note = 2'-OMe modified nucleotide
  modified_base 4: mod_base = OTHER; note = 2'-OMe modified nucleotide
  modified_base 6: mod_base = OTHER; note = 2'-OMe modified nucleotide
  modified_base 8..12: mod_base = OTHER; note = 2'-OMe modified nucleotide
  modified_base 14: mod_base = OTHER; note = 2'-OMe modified nucleotide
  modified_base 16: mod_base = OTHER; note = 2'-OMe modified nucleotide
  modified_base 18: mod_base = OTHER; note = 2'-OMe modified nucleotide
  modified_base 20: mod_base = OTHER; note = 2'-OMe modified nucleotide
  modified_base 22..24: mod_base = OTHER; note = 2'-OMe modified nucleotide
  modified_base 3: mod_base = OTHER; note = 2-deoxy-2-fluoro ribonucleotide
  modified_base 5: mod_base = OTHER; note = 2-deoxy-2-fluoro ribonucleotide
  modified_base 7: mod_base = OTHER; note = 2-deoxy-2-fluoro ribonucleotide
  modified_base 13: mod_base = OTHER; note = 2-deoxy-2-fluoro ribonucleotide
  modified_base 15: mod_base = OTHER; note = 2-deoxy-2-fluoro ribonucleotide
  modified_base 17: mod_base = OTHER; note = 2-deoxy-2-fluoro ribonucleotide
  modified_base 19: mod_base = OTHER; note = 2-deoxy-2-fluoro ribonucleotide
  modified_base 21: mod_base = OTHER; note = 2-deoxy-2-fluoro ribonucleotide
  modified_base 2..3: mod_base = OTHER; note = phosphorothioate internucleotide linkage
  modified_base 3..4: mod_base = OTHER; note = phosphorothioate internucleotide linkage
  modified_base 4..5: mod_base = OTHER; note = phosphorothioate internucleotide linkage
  modified_base 22..23: mod_base = OTHER; note = phosphorothioate internucleotide linkage
  modified_base 23..24: mod_base = OTHER; note = phosphorothioate internucleotide linkage
  modified_base 1: mod_base = OTHER; note = Thymine
ttcgtataacaataaggggctgcc

SEQ ID NO: 766 - RNA, 24 nt, synthetic construct
  source 1..24: mol_type = other RNA
  modified_base 1: mod_base = OTHER; note = 2'-deoxy nucleotide
  modified_base 2: mod_base = OTHER; note = 2'-OMe modified nucleotide
  modified_base 4: mod_base = OTHER; note = 2'-OMe modified nucleotide
  modified_base 6: mod_base = OTHER; note = 2'-OMe modified nucleotide
  modified_base 8..12: mod_base = OTHER; note = 2'-OMe modified nucleotide
  modified_base 14: mod_base = OTHER; note = 2'-OMe modified nucleotide
  modified_base 16: mod_base = OTHER; note = 2'-OMe modified nucleotide
  modified_base 18: mod_base = OTHER; note = 2'-OMe modified nucleotide
  modified_base 20: mod_base = OTHER; note = 2'-OMe modified nucleotide
  modified_base 22..24: mod_base = OTHER; note = 2'-OMe modified nucleotide
  modified_base 3: mod_base = OTHER; note = 2-deoxy-2-fluoro ribonucleotide
  modified_base 5: mod_base = OTHER; note = 2-deoxy-2-fluoro ribonucleotide
  modified_base 7: mod_base = OTHER; note = 2-deoxy-2-fluoro ribonucleotide
  modified_base 13: mod_base = OTHER; note = 2-deoxy-2-fluoro ribonucleotide
  modified_base 15: mod_base = OTHER; note = 2-deoxy-2-fluoro ribonucleotide
  modified_base 17: mod_base = OTHER; note = 2-deoxy-2-fluoro ribonucleotide
  modified_base 19: mod_base = OTHER; note = 2-deoxy-2-fluoro ribonucleotide
  modified_base 21: mod_base = OTHER; note = 2-deoxy-2-fluoro ribonucleotide
  modified_base 2..3: mod_base = OTHER; note = phosphorothioate internucleotide linkage
  modified_base 3..4: mod_base = OTHER; note = phosphorothioate internucleotide linkage
  modified_base 4..5: mod_base = OTHER; note = phosphorothioate internucleotide linkage
  modified_base 23..24: mod_base = OTHER; note = phosphorothioate internucleotide linkage
  modified_base 1: mod_base = OTHER; note = Thymine
ttcgtataacaataaggggctgcc

SEQ ID NO: 767 - RNA, 22 nt, synthetic construct
  source 1..22: mol_type = other RNA
  modified_base 1: mod_base = OTHER; note = 2'-deoxy nucleotide
  modified_base 2: mod_base = OTHER; note = 2'-OMe modified nucleotide
  modified_base 4: mod_base = OTHER; note = 2'-OMe modified nucleotide
  modified_base 6: mod_base = OTHER; note = 2'-OMe modified nucleotide
  modified_base 8..12: mod_base = OTHER; note = 2'-OMe modified nucleotide
  modified_base 14: mod_base = OTHER; note = 2'-OMe modified nucleotide
  modified_base 16: mod_base = OTHER; note = 2'-OMe modified nucleotide
  modified_base 18: mod_base = OTHER; note = 2'-OMe modified nucleotide
  modified_base 20..22: mod_base = OTHER; note = 2'-OMe modified nucleotide
  modified_base 3: mod_base = OTHER; note = 2-deoxy-2-fluoro ribonucleotide
  modified_base 5: mod_base = OTHER; note = 2-deoxy-2-fluoro ribonucleotide
  modified_base 7: mod_base = OTHER; note = 2-deoxy-2-fluoro ribonucleotide
  modified_base 13: mod_base = OTHER; note = 2-deoxy-2-fluoro ribonucleotide
  modified_base 15: mod_base = OTHER; note = 2-deoxy-2-fluoro ribonucleotide
  modified_base 17: mod_base = OTHER; note = 2-deoxy-2-fluoro ribonucleotide
  modified_base 19: mod_base = OTHER; note = 2-deoxy-2-fluoro ribonucleotide
  modified_base 2..3: mod_base = OTHER; note = phosphorothioate internucleotide linkage
  modified_base 3..4: mod_base = OTHER; note = phosphorothioate internucleotide linkage
  modified_base 4..5: mod_base = OTHER; note = phosphorothioate internucleotide linkage
  modified_base 21..22: mod_base = OTHER; note = phosphorothioate internucleotide linkage
  modified_base 1: mod_base = OTHER; note = Thymine
ttcgtataacaataaggggctg

SEQ ID NO: 768 - RNA, 21 nt, synthetic construct
  source 1..21: mol_type = other RNA
  modified_base 3: mod_base = OTHER; note = 2'-OMe modified nucleotide
  modified_base 5: mod_base = OTHER; note = 2'-OMe modified nucleotide
  modified_base 7: mod_base = OTHER; note = 2'-OMe modified nucleotide
  modified_base 11..13: mod_base = OTHER; note = 2'-OMe modified nucleotide
  modified_base 15: mod_base = OTHER; note = 2'-OMe modified nucleotide
  modified_base 17: mod_base = OTHER; note = 2'-OMe modified nucleotide
  modified_base 19..21: mod_base = OTHER; note = 2'-OMe modified nucleotide
  modified_base 2: mod_base = OTHER; note = 2-deoxy-2-fluoro ribonucleotide
  modified_base 4: mod_base = OTHER; note = 2-deoxy-2-fluoro ribonucleotide
  modified_base 6: mod_base = OTHER; note = 2-deoxy-2-fluoro ribonucleotide
  modified_base 8..10: mod_base = OTHER; note = 2-deoxy-2-fluoro ribonucleotide
  modified_base 14: mod_base = OTHER; note = 2-deoxy-2-fluoro ribonucleotide
  modified_base 16: mod_base = OTHER; note = 2-deoxy-2-fluoro ribonucleotide
  modified_base 18: mod_base = OTHER; note = 2-deoxy-2-fluoro ribonucleotide
  modified_base 1..2: mod_base = OTHER; note = phosphorothioate internucleotide linkage
  modified_base 2..3: mod_base = OTHER; note = phosphorothioate internucleotide linkage
  modified_base 3..4: mod_base = OTHER; note = phosphorothioate internucleotide linkage
  modified_base 20..21: mod_base = OTHER; note = phosphorothioate internucleotide linkage
  modified_base 1: mod_base = OTHER; note = Thymine
tcgtataacaataaggggctt

SEQ ID NO: 769 - RNA, 21 nt, synthetic construct
  source 1..21: mol_type = other RNA
  modified_base 3: mod_base = OTHER; note = 2'-OMe modified nucleotide
  modified_base 5: mod_base = OTHER; note = 2'-OMe modified nucleotide
  modified_base 7: mod_base = OTHER; note = 2'-OMe modified nucleotide
  modified_base 11..13: mod_base = OTHER; note = 2'-OMe modified nucleotide
  modified_base 15: mod_base = OTHER; note = 2'-OMe modified nucleotide
  modified_base 17: mod_base = OTHER; note = 2'-OMe modified nucleotide
  modified_base 19..21: mod_base = OTHER; note = 2'-OMe modified nucleotide
  modified_base 1: mod_base = OTHER; note = 2'-methoxyethyl nucleotide
  modified_base 2: mod_base = OTHER; note = 2-deoxy-2-fluoro ribonucleotide
  modified_base 4: mod_base = OTHER; note = 2-deoxy-2-fluoro ribonucleotide
  modified_base 6: mod_base = OTHER; note = 2-deoxy-2-fluoro ribonucleotide
  modified_base 8..10: mod_base = OTHER; note = 2-deoxy-2-fluoro ribonucleotide
  modified_base 14: mod_base = OTHER; note = 2-deoxy-2-fluoro ribonucleotide
  modified_base 16: mod_base = OTHER; note = 2-deoxy-2-fluoro ribonucleotide
  modified_base 18: mod_base = OTHER; note = 2-deoxy-2-fluoro ribonucleotide
  modified_base 1..2: mod_base = OTHER; note = phosphorothioate internucleotide linkage
  modified_base 2..3: mod_base = OTHER; note = phosphorothioate internucleotide linkage
  modified_base 3..4: mod_base = OTHER; note = phosphorothioate internucleotide linkage
  modified_base 20..21: mod_base = OTHER; note = phosphorothioate internucleotide linkage
  modified_base 1: mod_base = OTHER; note = Thymine
tcgtataacaataaggggctt

SEQ ID NO: 770 - RNA, 26 nt, synthetic construct
  source 1..26: mol_type = other RNA
  modified_base 1: mod_base = OTHER; note = 2'-OMe modified nucleotide
  modified_base 3: mod_base = OTHER; note = 2'-OMe modified nucleotide
  modified_base 5: mod_base = OTHER; note = 2'-OMe modified nucleotide
  modified_base 7: mod_base = OTHER; note = 2'-OMe modified nucleotide
  modified_base 9: mod_base = OTHER; note = 2'-OMe modified nucleotide
  modified_base 11: mod_base = OTHER; note = 2'-OMe modified nucleotide
  modified_base 12: mod_base = OTHER; note = 2'-OMe modified nucleotide
  modified_base 13: mod_base = OTHER; note = 2'-OMe modified nucleotide
  modified_base 15: mod_base = OTHER; note = 2'-OMe modified nucleotide
  modified_base 17: mod_base = OTHER; note = 2'-OMe modified nucleotide
  modified_base 19: mod_base = OTHER; note = 2'-OMe modified nucleotide
  modified_base 21: mod_base = OTHER; note = 2'-OMe modified nucleotide
  modified_base 22: mod_base = OTHER; note = 2'-OMe modified nucleotide
  modified_base 23: mod_base = OTHER; note = 2'-OMe modified nucleotide
  modified_base 24: mod_base = OTHER; note = 2'-OMe modified nucleotide
  modified_base 26: mod_base = OTHER; note = 2'-OMe modified nucleotide
  modified_base 2: mod_base = OTHER; note = 2-deoxy-2-fluoro ribonucleotide
  modified_base 4: mod_base = OTHER; note = 2-deoxy-2-fluoro ribonucleotide
  modified_base 6: mod_base = OTHER; note = 2-deoxy-2-fluoro ribonucleotide
  modified_base 8: mod_base = OTHER; note = 2-deoxy-2-fluoro ribonucleotide
  modified_base 10: mod_base = OTHER; note = 2-deoxy-2-fluoro ribonucleotide
  modified_base 14: mod_base = OTHER; note = 2-deoxy-2-fluoro ribonucleotide
  modified_base 16: mod_base = OTHER; note = 2-deoxy-2-fluoro ribonucleotide
  modified_base 18: mod_base = OTHER; note = 2-deoxy-2-fluoro ribonucleotide
  modified_base 20: mod_base = OTHER; note = 2-deoxy-2-fluoro ribonucleotide
  modified_base 1..2: mod_base = OTHER; note = phosphorothioate internucleotide linkage
  modified_base 2..3: mod_base = OTHER; note = phosphorothioate internucleotide linkage
  modified_base 20..21: mod_base = OTHER; note = phosphorothioate internucleotide linkage
  modified_base 21..22: mod_base = OTHER; note = phosphorothioate internucleotide linkage
tgagaatgagcctcgataactcttat

SEQ ID NO: 771 - RNA, 26 nt, synthetic construct
  source 1..26: mol_type = other RNA
  modified_base 1: mod_base = OTHER; note = 2'-OMe modified nucleotide
  modified_base 3: mod_base = OTHER; note = 2'-OMe modified nucleotide
  modified_base 5: mod_base = OTHER; note = 2'-OMe modified nucleotide
  modified_base 7: mod_base = OTHER; note = 2'-OMe modified nucleotide
  modified_base 9: mod_base = OTHER; note = 2'-OMe modified nucleotide
  modified_base 11: mod_base = OTHER; note = 2'-OMe modified nucleotide
  modified_base 12: mod_base = OTHER; note = 2'-OMe modified nucleotide
  modified_base 13: mod_base = OTHER; note = 2'-OMe modified nucleotide
  modified_base 15: mod_base = OTHER; note = 2'-OMe modified nucleotide
  modified_base 17: mod_base = OTHER; note = 2'-OMe modified nucleotide
  modified_base 19: mod_base = OTHER; note = 2'-OMe modified nucleotide
  modified_base 21: mod_base = OTHER; note = 2'-OMe modified nucleotide
  modified_base 22: mod_base = OTHER; note = 2'-OMe modified nucleotide
  modified_base 23: mod_base = OTHER; note = 2'-OMe modified nucleotide
  modified_base 24: mod_base = OTHER; note = 2'-OMe modified nucleotide
  modified_base 26: mod_base = OTHER; note = 2'-OMe modified nucleotide
  modified_base 2: mod_base = OTHER; note = 2-deoxy-2-fluoro ribonucleotide
  modified_base 4: mod_base = OTHER; note = 2-deoxy-2-fluoro ribonucleotide
  modified_base 6: mod_base = OTHER; note = 2-deoxy-2-fluoro ribonucleotide
  modified_base 8: mod_base = OTHER; note = 2-deoxy-2-fluoro ribonucleotide
  modified_base 10: mod_base = OTHER; note = 2-deoxy-2-fluoro ribonucleotide
  modified_base 14: mod_base = OTHER; note = 2-deoxy-2-fluoro ribonucleotide
  modified_base 16: mod_base = OTHER; note = 2-deoxy-2-fluoro ribonucleotide
  modified_base 18: mod_base = OTHER; note = 2-deoxy-2-fluoro ribonucleotide
  modified_base 20: mod_base = OTHER; note = 2-deoxy-2-fluoro ribonucleotide
  modified_base 1..2: mod_base = OTHER; note = phosphorothioate internucleotide linkage
  modified_base 2..3: mod_base = OTHER; note = phosphorothioate internucleotide linkage
  modified_base 19..20: mod_base = OTHER; note = phosphorothioate internucleotide linkage
  modified_base 20..21: mod_base = OTHER; note = phosphorothioate internucleotide linkage
tgagaatgagcctcgataactcttat

SEQ ID NO: 772 - RNA, 26 nt, synthetic construct
  source 1..26: mol_type = other RNA
  modified_base 1: mod_base = OTHER; note = 2'-OMe modified nucleotide
  modified_base 3: mod_base = OTHER; note = 2'-OMe modified nucleotide
  modified_base 5: mod_base = OTHER; note = 2'-OMe modified nucleotide
  modified_base 7: mod_base = OTHER; note = 2'-OMe modified nucleotide
  modified_base 9: mod_base = OTHER; note = 2'-OMe modified nucleotide
  modified_base 11: mod_base = OTHER; note = 2'-OMe modified nucleotide
  modified_base 12: mod_base = OTHER; note = 2'-OMe modified nucleotide
  modified_base 13: mod_base = OTHER; note = 2'-OMe modified nucleotide
  modified_base 15: mod_base = OTHER; note = 2'-OMe modified nucleotide
  modified_base 17: mod_base = OTHER; note = 2'-OMe modified nucleotide
  modified_base 19: mod_base = OTHER; note = 2'-OMe modified nucleotide
  modified_base 21: mod_base = OTHER; note = 2'-OMe modified nucleotide
  modified_base 22: mod_base = OTHER; note = 2'-OMe modified nucleotide
  modified_base 23: mod_base = OTHER; note = 2'-OMe modified nucleotide
  modified_base 24: mod_base = OTHER; note = 2'-OMe modified nucleotide
  modified_base 26: mod_base = OTHER; note = 2'-OMe modified nucleotide
  modified_base 2: mod_base = OTHER; note = 2-deoxy-2-fluoro ribonucleotide
  modified_base 4: mod_base = OTHER; note = 2-deoxy-2-fluoro ribonucleotide
  modified_base 6: mod_base = OTHER; note = 2-deoxy-2-fluoro ribonucleotide
  modified_base 8: mod_base = OTHER; note = 2-deoxy-2-fluoro ribonucleotide
  modified_base 10: mod_base = OTHER; note = 2-deoxy-2-fluoro ribonucleotide
  modified_base 14: mod_base = OTHER; note = 2-deoxy-2-fluoro ribonucleotide
  modified_base 16: mod_base = OTHER; note = 2-deoxy-2-fluoro ribonucleotide
  modified_base 18: mod_base = OTHER; note = 2-deoxy-2-fluoro ribonucleotide
  modified_base 20: mod_base = OTHER; note = 2-deoxy-2-fluoro ribonucleotide
  modified_base 1..2: mod_base = OTHER; note = phosphorothioate internucleotide linkage
  modified_base 2..3: mod_base = OTHER; note = phosphorothioate internucleotide linkage
  modified_base 22..23: mod_base = OTHER; note = phosphorothioate internucleotide linkage
  modified_base 23..24: mod_base = OTHER; note = phosphorothioate internucleotide linkage
tgagaatgagcctcgataactatcgc

SEQ ID NO: 773 - RNA, 26 nt, synthetic construct
  source 1..26: mol_type = other RNA
  modified_base 1: mod_base = OTHER; note = 2'-OMe modified nucleotide
  modified_base 3: mod_base = OTHER; note = 2'-OMe modified nucleotide
  modified_base 5: mod_base = OTHER; note = 2'-OMe modified nucleotide
  modified_base 7: mod_base = OTHER; note = 2'-OMe modified nucleotide
  modified_base 9: mod_base = OTHER; note = 2'-OMe modified nucleotide
  modified_base 11: mod_base = OTHER; note = 2'-OMe modified nucleotide
  modified_base 12: mod_base = OTHER; note = 2'-OMe modified nucleotide
  modified_base 13: mod_base = OTHER; note = 2'-OMe modified nucleotide
  modified_base 15: mod_base = OTHER; note = 2'-OMe modified nucleotide
  modified_base 17: mod_base = OTHER; note = 2'-OMe modified nucleotide
  modified_base 19: mod_base = OTHER; note = 2'-OMe modified nucleotide
  modified_base 21: mod_base = OTHER; note = 2'-OMe modified nucleotide
  modified_base 22: mod_base = OTHER; note = 2'-OMe modified nucleotide
  modified_base 23: mod_base = OTHER; note = 2'-OMe modified nucleotide
  modified_base 24: mod_base = OTHER; note = 2'-OMe modified nucleotide
  modified_base 26: mod_base = OTHER; note = 2'-OMe modified nucleotide
  modified_base 2: mod_base = OTHER; note = 2-deoxy-2-fluoro ribonucleotide
  modified_base 4: mod_base = OTHER; note = 2-deoxy-2-fluoro ribonucleotide
  modified_base 6: mod_base = OTHER; note = 2-deoxy-2-fluoro ribonucleotide
  modified_base 8: mod_base = OTHER; note = 2-deoxy-2-fluoro ribonucleotide
  modified_base 10: mod_base = OTHER; note = 2-deoxy-2-fluoro ribonucleotide
  modified_base 14: mod_base = OTHER; note = 2-deoxy-2-fluoro ribonucleotide
  modified_base 16: mod_base = OTHER; note = 2-deoxy-2-fluoro ribonucleotide
  modified_base 18: mod_base = OTHER; note = 2-deoxy-2-fluoro ribonucleotide
  modified_base 20: mod_base = OTHER; note = 2-deoxy-2-fluoro ribonucleotide
  modified_base 1..2: mod_base = OTHER; note = phosphorothioate internucleotide linkage
  modified_base 2..3: mod_base = OTHER; note = phosphorothioate internucleotide linkage
  modified_base 22..23: mod_base = OTHER; note = phosphorothioate internucleotide linkage
  modified_base 23..24: mod_base = OTHER; note = phosphorothioate internucleotide linkage
tgagaatgagcctcgataactattca

SEQ ID NO: 774 - RNA, 26 nt, synthetic construct
  source 1..26: mol_type = other RNA
  modified_base 1: mod_base = OTHER; note = 2'-OMe modified nucleotide
  modified_base 3: mod_base = OTHER; note = 2'-OMe modified nucleotide
  modified_base 5: mod_base = OTHER; note = 2'-OMe modified nucleotide
  modified_base 7: mod_base = OTHER; note = 2'-OMe modified nucleotide
  modified_base 9: mod_base = OTHER; note = 2'-OMe modified nucleotide
  modified_base 11: mod_base = OTHER; note = 2'-OMe modified nucleotide
  modified_base 12: mod_base = OTHER; note = 2'-OMe modified nucleotide
  modified_base 13: mod_base = OTHER; note = 2'-OMe modified nucleotide
  modified_base 15: mod_base = OTHER; note = 2'-OMe modified nucleotide
  modified_base 17: mod_base = OTHER; note = 2'-OMe modified nucleotide
  modified_base 19: mod_base = OTHER; note = 2'-OMe modified nucleotide
  modified_base 21: mod_base = OTHER; note = 2'-OMe modified nucleotide
  modified_base 22: mod_base = OTHER; note = 2'-OMe modified nucleotide
  modified_base 23: mod_base = OTHER; note = 2'-OMe modified nucleotide
  modified_base 24: mod_base = OTHER; note = 2'-OMe modified nucleotide
  modified_base 26: mod_base = OTHER; note = 2'-OMe modified nucleotide
  modified_base 2: mod_base = OTHER; note = 2-deoxy-2-fluoro ribonucleotide
  modified_base 4: mod_base = OTHER; note = 2-deoxy-2-fluoro ribonucleotide
  modified_base 6: mod_base = OTHER; note = 2-deoxy-2-fluoro ribonucleotide
  modified_base 8: mod_base = OTHER; note = 2-deoxy-2-fluoro ribonucleotide
  modified_base 10: mod_base = OTHER; note = 2-deoxy-2-fluoro ribonucleotide
  modified_base 14: mod_base = OTHER; note = 2-deoxy-2-fluoro ribonucleotide
  modified_base 16: mod_base = OTHER; note = 2-deoxy-2-fluoro ribonucleotide
  modified_base 18: mod_base = OTHER; note = 2-deoxy-2-fluoro ribonucleotide
  modified_base 20: mod_base = OTHER; note = 2-deoxy-2-fluoro ribonucleotide
  modified_base 1..2: mod_base = OTHER; note = phosphorothioate internucleotide linkage
  modified_base 2..3: mod_base = OTHER; note = phosphorothioate internucleotide linkage
  modified_base 22..23: mod_base = OTHER; note = phosphorothioate internucleotide linkage
  modified_base 23..24: mod_base = OTHER; note = phosphorothioate internucleotide linkage
tgagaatgagcctcgataactacgat

SEQ ID NO: 775 - RNA, 26 nt, synthetic construct
  source 1..26: mol_type = other RNA
  modified_base 1: mod_base = OTHER; note = 2'-OMe modified nucleotide
  modified_base 3: mod_base = OTHER; note = 2'-OMe modified nucleotide
  modified_base 5: mod_base = OTHER; note = 2'-OMe modified nucleotide
  modified_base 7: mod_base = OTHER; note = 2'-OMe modified nucleotide
  modified_base 9: mod_base = OTHER; note = 2'-OMe modified nucleotide
  modified_base 11: mod_base = OTHER; note = 2'-OMe modified nucleotide
  modified_base 12: mod_base = OTHER; note = 2'-OMe modified nucleotide
  modified_base 13: mod_base = OTHER; note = 2'-OMe modified nucleotide
  modified_base 15: mod_base = OTHER; note = 2'-OMe modified nucleotide
  modified_base 17: mod_base = OTHER; note = 2'-OMe modified nucleotide
  modified_base 19: mod_base = OTHER; note = 2'-OMe modified nucleotide
  modified_base 21: mod_base = OTHER; note = 2'-OMe modified nucleotide
  modified_base 22: mod_base = OTHER; note = 2'-OMe modified nucleotide
  modified_base 23: mod_base = OTHER; note = 2'-OMe modified nucleotide
  modified_base 24: mod_base = OTHER; note = 2'-OMe modified nucleotide
  modified_base 26: mod_base = OTHER; note = 2'-OMe modified nucleotide
  modified_base 2: mod_base = OTHER; note = 5'-Me, 2'-fluoro nucleotide
  modified_base 4: mod_base = OTHER; note = 2-deoxy-2-fluoro ribonucleotide
  modified_base 6: mod_base = OTHER; note = 2-deoxy-2-fluoro ribonucleotide
  modified_base 8: mod_base = OTHER; note = 2-deoxy-2-fluoro ribonucleotide
  modified_base 10: mod_base = OTHER; note = 2-deoxy-2-fluoro ribonucleotide
  modified_base 14: mod_base = OTHER; note = 2-deoxy-2-fluoro ribonucleotide
  modified_base 16: mod_base = OTHER; note = 2-deoxy-2-fluoro ribonucleotide
  modified_base 18: mod_base = OTHER; note = 2-deoxy-2-fluoro ribonucleotide
  modified_base 20: mod_base = OTHER; note = 2-deoxy-2-fluoro ribonucleotide
  modified_base 1..2: mod_base = OTHER; note = phosphorothioate internucleotide linkage
  modified_base 2..3: mod_base = OTHER; note = phosphorothioate internucleotide linkage
  modified_base 22..23: mod_base = OTHER; note = phosphorothioate internucleotide linkage
  modified_base 23..24: mod_base = OTHER; note = phosphorothioate internucleotide linkage
tgagaatgagcctcgataactcttat

SEQ ID NO: 776 - RNA, 26 nt, synthetic construct
  source 1..26: mol_type = other RNA
  modified_base 1: mod_base = OTHER; note = 2'-OMe modified nucleotide
  modified_base 3: mod_base = OTHER; note = 2'-OMe modified nucleotide
  modified_base 5: mod_base = OTHER; note = 2'-OMe modified nucleotide
  modified_base 7: mod_base = OTHER; note = 2'-OMe modified nucleotide
  modified_base 9: mod_base = OTHER; note = 2'-OMe modified nucleotide
  modified_base 11: mod_base = OTHER; note = 2'-OMe modified nucleotide
  modified_base 12: mod_base = OTHER; note = 2'-OMe modified nucleotide
  modified_base 13: mod_base = OTHER; note = 2'-OMe modified nucleotide
  modified_base 15: mod_base = OTHER; note = 2'-OMe modified nucleotide
  modified_base 17: mod_base = OTHER; note = 2'-OMe modified nucleotide
  modified_base 19: mod_base = OTHER; note = 2'-OMe modified nucleotide
  modified_base 21: mod_base = OTHER; note = 2'-OMe modified nucleotide
  modified_base 22: mod_base = OTHER; note = 2'-OMe modified nucleotide
  modified_base 23: mod_base = OTHER; note = 2'-OMe modified nucleotide
  modified_base 24: mod_base = OTHER; note = 2'-OMe modified nucleotide
  modified_base 26: mod_base = OTHER; note = 2'-OMe modified nucleotide
  modified_base 4: mod_base = OTHER; note = 5'-Me, 2'-fluoro nucleotide
  modified_base 2: mod_base = OTHER; note = 2-deoxy-2-fluoro ribonucleotide
  modified_base 6: mod_base = OTHER; note = 2-deoxy-2-fluoro ribonucleotide
  modified_base 8: mod_base = OTHER; note = 2-deoxy-2-fluoro ribonucleotide
  modified_base 10: mod_base = OTHER; note = 2-deoxy-2-fluoro ribonucleotide
  modified_base 14: mod_base = OTHER; note = 2-deoxy-2-fluoro ribonucleotide
  modified_base 16: mod_base = OTHER; note = 2-deoxy-2-fluoro ribonucleotide
  modified_base 18: mod_base = OTHER; note = 2-deoxy-2-fluoro ribonucleotide
  modified_base 20: mod_base = OTHER; note = 2-deoxy-2-fluoro ribonucleotide
  modified_base 1..2: mod_base = OTHER; note = phosphorothioate internucleotide linkage
  modified_base 2..3: mod_base = OTHER; note = phosphorothioate internucleotide linkage
  modified_base 22..23: mod_base = OTHER; note = phosphorothioate internucleotide linkage
  modified_base 23..24: mod_base = OTHER; note = phosphorothioate internucleotide linkage
tgagaatgagcctcgataactcttat

SEQ ID NO: 777 - RNA, 26 nt, synthetic construct
  source 1..26: mol_type = other RNA
  modified_base 1: mod_base = OTHER; note = 2'-OMe modified nucleotide
  modified_base 3: mod_base = OTHER; note = 2'-OMe modified nucleotide
  modified_base 5: mod_base = OTHER; note = 2'-OMe modified nucleotide
  modified_base 7: mod_base = OTHER; note = 2'-OMe modified nucleotide
  modified_base 9: mod_base = OTHER; note = 2'-OMe modified nucleotide
  modified_base 11: mod_base = OTHER; note = 2'-OMe modified nucleotide
  modified_base 12: mod_base = OTHER; note = 2'-OMe modified nucleotide
  modified_base 13: mod_base = OTHER; note = 2'-OMe modified nucleotide
  modified_base 15: mod_base = OTHER; note = 2'-OMe modified nucleotide
  modified_base 17: mod_base = OTHER; note = 2'-OMe modified nucleotide
  modified_base 19: mod_base = OTHER; note = 2'-OMe modified nucleotide
  modified_base 21: mod_base = OTHER; note = 2'-OMe modified nucleotide
  modified_base 22: mod_base = OTHER; note = 2'-OMe modified nucleotide
  modified_base 23: mod_base = OTHER; note = 2'-OMe modified nucleotide
  modified_base 24: mod_base = OTHER; note = 2'-OMe modified nucleotide
  modified_base 26: mod_base = OTHER; note = 2'-OMe modified nucleotide
  modified_base 8: mod_base = OTHER; note = 5'-Me, 2'-fluoro nucleotide
  modified_base 2: mod_base = OTHER; note = 2-deoxy-2-fluoro ribonucleotide
  modified_base 4: mod_base = OTHER; note = 2-deoxy-2-fluoro ribonucleotide
  modified_base 6: mod_base = OTHER; note = 2-deoxy-2-fluoro ribonucleotide
  modified_base 10: mod_base = OTHER; note = 2-deoxy-2-fluoro ribonucleotide
  modified_base 14: mod_base = OTHER; note = 2-deoxy-2-fluoro ribonucleotide
  modified_base 16: mod_base = OTHER; note = 2-deoxy-2-fluoro ribonucleotide
  modified_base 18: mod_base = OTHER; note = 2-deoxy-2-fluoro ribonucleotide
  modified_base 20: mod_base = OTHER; note = 2-deoxy-2-fluoro ribonucleotide
  modified_base 1..2: mod_base = OTHER; note = phosphorothioate internucleotide linkage
  modified_base 2..3: mod_base = OTHER; note = phosphorothioate internucleotide linkage
  modified_base 22..23: mod_base = OTHER; note = phosphorothioate internucleotide linkage
  modified_base 23..24: mod_base = OTHER; note = phosphorothioate internucleotide linkage
tgagaatgagcctcgataactcttat

SEQ ID NO: 778 - RNA, 26 nt, synthetic construct
  source 1..26: mol_type = other RNA
  modified_base 1: mod_base = OTHER; note = 2'-OMe modified nucleotide
  modified_base 3: mod_base = OTHER; note = 2'-OMe modified nucleotide
  modified_base 5: mod_base = OTHER; note = 2'-OMe modified nucleotide
  modified_base 7: mod_base = OTHER; note = 2'-OMe modified nucleotide
  modified_base 9: mod_base = OTHER; note = 2'-OMe modified nucleotide
  modified_base 11: mod_base = OTHER; note = 2'-OMe modified nucleotide
  modified_base 12: mod_base = OTHER; note = 2'-OMe modified nucleotide
  modified_base 13: mod_base = OTHER; note = 2'-OMe modified nucleotide
  modified_base 15: mod_base = OTHER; note = 2'-OMe modified nucleotide
  modified_base 17: mod_base = OTHER; note = 2'-OMe modified nucleotide
  modified_base 19: mod_base = OTHER; note = 2'-OMe modified nucleotide
  modified_base 21: mod_base = OTHER; note = 2'-OMe modified nucleotide
  modified_base 22: mod_base = OTHER; note = 2'-OMe modified nucleotide
  modified_base 23: mod_base = OTHER; note = 2'-OMe modified nucleotide
  modified_base 24: mod_base = OTHER; note = 2'-OMe modified nucleotide
  modified_base 26: mod_base = OTHER; note = 2'-OMe modified nucleotide
  modified_base 10: mod_base = OTHER; note = 5'-Me, 2'-fluoro nucleotide
  modified_base 2: mod_base = OTHER; note = 2-deoxy-2-fluoro ribonucleotide
  modified_base 4: mod_base = OTHER; note = 2-deoxy-2-fluoro ribonucleotide
  modified_base 6: mod_base = OTHER; note = 2-deoxy-2-fluoro ribonucleotide
  modified_base 8: mod_base = OTHER; note = 2-deoxy-2-fluoro ribonucleotide
  modified_base 14: mod_base = OTHER; note = 2-deoxy-2-fluoro ribonucleotide
  modified_base 16: mod_base = OTHER; note = 2-deoxy-2-fluoro ribonucleotide
  modified_base 18: mod_base = OTHER; note = 2-deoxy-2-fluoro ribonucleotide
  modified_base 20: mod_base = OTHER; note = 2-deoxy-2-fluoro ribonucleotide
  modified_base 1..2: mod_base = OTHER; note = phosphorothioate internucleotide linkage
  modified_base 2..3: mod_base = OTHER; note = phosphorothioate internucleotide linkage
  modified_base 22..23: mod_base = OTHER; note = phosphorothioate internucleotide linkage
  modified_base 23..24: mod_base = OTHER; note = phosphorothioate internucleotide linkage
tgagaatgagcctcgataactcttat

SEQ ID NO: 779 - RNA, 21 nt, synthetic construct
  source 1..21: mol_type = other RNA
  modified_base 1: mod_base = OTHER; note = 5' end Vinyl Phosphonate modification
  modified_base 1: mod_base = OTHER; note = 2'-OMe modified nucleotide
  modified_base 3: mod_base = OTHER; note = 2'-OMe modified nucleotide
  modified_base 5: mod_base = OTHER; note = 2'-OMe modified nucleotide
  modified_base 7: mod_base = OTHER; note = 2'-OMe modified nucleotide
  modified_base 11..13: mod_base = OTHER; note = 2'-OMe modified nucleotide
  modified_base 15: mod_base = OTHER; note = 2'-OMe modified nucleotide
  modified_base 17: mod_base = OTHER; note = 2'-OMe modified nucleotide
  modified_base 19..21: mod_base = OTHER; note = 2'-OMe modified nucleotide
  modified_base 2: mod_base = OTHER; note = 2-deoxy-2-fluoro ribonucleotide
  modified_base 4: mod_base = OTHER; note = 2-deoxy-2-fluoro ribonucleotide
  modified_base 6: mod_base = OTHER; note = 2-deoxy-2-fluoro ribonucleotide
  modified_base 8..10: mod_base = OTHER; note = 2-deoxy-2-fluoro ribonucleotide
  modified_base 14: mod_base = OTHER; note = 2-deoxy-2-fluoro ribonucleotide
  modified_base 16: mod_base = OTHER; note = 2-deoxy-2-fluoro ribonucleotide
  modified_base 18: mod_base = OTHER; note = 2-deoxy-2-fluoro ribonucleotide
  modified_base 1..2: mod_base = OTHER; note = phosphorothioate internucleotide linkage
  modified_base 2..3: mod_base = OTHER; note = phosphorothioate internucleotide linkage
  modified_base 3..4: mod_base = OTHER; note = phosphorothioate internucleotide linkage
  modified_base 20..21: mod_base = OTHER; note = phosphorothioate internucleotide linkage
tcgtataacaataaggggcgt

SEQ ID NO: 780 - RNA, 24 nt, synthetic construct
  source 1..24: mol_type = other RNA
  modified_base 1: mod_base = OTHER; note = 2'-OMe modified nucleotide
  modified_base 3: mod_base = OTHER; note = 2'-OMe modified nucleotide
  modified_base 5: mod_base = OTHER; note = 2'-OMe modified nucleotide
  modified_base 7..11: mod_base = OTHER; note = 2'-OMe modified nucleotide
  modified_base 13: mod_base = OTHER; note = 2'-OMe modified nucleotide
  modified_base 15: mod_base = OTHER; note = 2'-OMe modified nucleotide
  modified_base 17: mod_base = OTHER; note = 2'-OMe modified nucleotide
  modified_base 19: mod_base = OTHER; note = 2'-OMe modified nucleotide
  modified_base 21: mod_base = OTHER; note = 2'-OMe modified nucleotide
  modified_base 23..24: mod_base = OTHER; note = 2'-OMe modified nucleotide
  modified_base 2: mod_base = OTHER; note = 2-deoxy-2-fluoro ribonucleotide
  modified_base 4: mod_base = OTHER; note = 2-deoxy-2-fluoro ribonucleotide
  modified_base 6: mod_base = OTHER; note = 2-deoxy-2-fluoro ribonucleotide
  modified_base 12: mod_base = OTHER; note = 2-deoxy-2-fluoro ribonucleotide
  modified_base 14: mod_base = OTHER; note = 2-deoxy-2-fluoro ribonucleotide
  modified_base 16: mod_base = OTHER; note = 2-deoxy-2-fluoro ribonucleotide
  modified_base 18: mod_base = OTHER; note = 2-deoxy-2-fluoro ribonucleotide
  modified_base 20: mod_base = OTHER; note = 2-deoxy-2-fluoro ribonucleotide
  modified_base 22: mod_base = OTHER; note = 2-deoxy-2-fluoro ribonucleotide
  modified_base 1..2: mod_base = OTHER; note = phosphorothioate internucleotide linkage
  modified_base 2..3: mod_base = OTHER; note = phosphorothioate internucleotide linkage
  modified_base 22..23: mod_base = OTHER; note = phosphorothioate internucleotide linkage
  modified_base 23..24: mod_base = OTHER; note = phosphorothioate internucleotide linkage
tcgtataacaataaggggctgcct

SEQ ID NO: 781 - RNA, 24 nt, synthetic construct
  source 1..24: mol_type = other RNA
  modified_base 1: mod_base = OTHER; note = 2'-OMe modified nucleotide
  modified_base 3: mod_base = OTHER; note = 2'-OMe modified nucleotide
  modified_base 5: mod_base = OTHER; note = 2'-OMe modified nucleotide
  modified_base 7..11: mod_base = OTHER; note = 2'-OMe modified nucleotide
  modified_base 13: mod_base = OTHER; note = 2'-OMe modified nucleotide
  modified_base 15: mod_base = OTHER; note = 2'-OMe modified nucleotide
  modified_base 17: mod_base = OTHER; note = 2'-OMe modified nucleotide
  modified_base 19: mod_base = OTHER; note = 2'-OMe modified nucleotide
  modified_base 21: mod_base = OTHER; note = 2'-OMe modified nucleotide
  modified_base 23..24: mod_base = OTHER; note = 2'-OMe modified nucleotide
  modified_base 2: mod_base = OTHER; note = 2-deoxy-2-fluoro ribonucleotide
  modified_base 4: mod_base = OTHER; note = 2-deoxy-2-fluoro ribonucleotide
  modified_base 6: mod_base = OTHER; note = 2-deoxy-2-fluoro ribonucleotide
  modified_base 12: mod_base = OTHER; note = 2-deoxy-2-fluoro ribonucleotide
  modified_base 14: mod_base = OTHER; note = 2-deoxy-2-fluoro ribonucleotide
  modified_base 16: mod_base = OTHER; note = 2-deoxy-2-fluoro ribonucleotide
  modified_base 18: mod_base = OTHER; note = 2-deoxy-2-fluoro ribonucleotide
  modified_base 20: mod_base = OTHER; note = 2-deoxy-2-fluoro ribonucleotide
  modified_base 22: mod_base = OTHER; note = 2-deoxy-2-fluoro ribonucleotide
  modified_base 1..2: mod_base = OTHER; note = phosphorothioate internucleotide linkage
  modified_base 2..3: mod_base = OTHER; note = phosphorothioate internucleotide linkage
  modified_base 22..23: mod_base = OTHER; note = phosphorothioate internucleotide linkage
  modified_base 23..24: mod_base = OTHER; note = phosphorothioate internucleotide linkage
tcgtataacaataaggggctgctt

SEQ ID NO: 782 - RNA, 24 nt, synthetic construct
  source 1..24: mol_type = other RNA
  modified_base 1: mod_base = OTHER; note = 5' end Vinyl Phosphonate modification
  modified_base 1: mod_base = OTHER; note = 2'-OMe modified nucleotide
  modified_base 3: mod_base = OTHER; note = 2'-OMe modified nucleotide
  modified_base 5: mod_base = OTHER; note = 2'-OMe modified nucleotide
  modified_base 7..11: mod_base = OTHER; note = 2'-OMe modified nucleotide
  modified_base 13: mod_base = OTHER; note = 2'-OMe modified nucleotide
  modified_base 15: mod_base = OTHER; note = 2'-OMe modified nucleotide
  modified_base 17: mod_base = OTHER; note = 2'-OMe modified nucleotide
  modified_base 19: mod_base = OTHER; note = 2'-OMe modified nucleotide
  modified_base 21: mod_base = OTHER; note = 2'-OMe modified nucleotide
  modified_base 23..24: mod_base = OTHER; note = 2'-OMe modified nucleotide
  modified_base 2: mod_base = OTHER; note = 2-deoxy-2-fluoro ribonucleotide
  modified_base 4: mod_base = OTHER; note = 2-deoxy-2-fluoro ribonucleotide
  modified_base 6: mod_base = OTHER; note = 2-deoxy-2-fluoro ribonucleotide
  modified_base 12: mod_base = OTHER; note = 2-deoxy-2-fluoro ribonucleotide
  modified_base 14: mod_base = OTHER; note = 2-deoxy-2-fluoro ribonucleotide
  modified_base 16: mod_base = OTHER; note = 2-deoxy-2-fluoro ribonucleotide
  modified_base 18: mod_base = OTHER; note = 2-deoxy-2-fluoro ribonucleotide
  modified_base 20: mod_base = OTHER; note = 2-deoxy-2-fluoro ribonucleotide
  modified_base 22: mod_base = OTHER; note = 2-deoxy-2-fluoro ribonucleotide
  modified_base 1..2: mod_base = OTHER; note = phosphorothioate internucleotide linkage
  modified_base 2..3: mod_base = OTHER; note = phosphorothioate internucleotide linkage
  modified_base 22..23: mod_base = OTHER; note = phosphorothioate internucleotide linkage
  modified_base 23..24: mod_base = OTHER; note = phosphorothioate internucleotide linkage
tcgtataacaataaggggctgcct

SEQ ID NO: 783 - RNA, 24 nt, synthetic construct
  source 1..24: mol_type = other RNA
  modified_base 1: mod_base = OTHER; note = 5' end Vinyl Phosphonate modification
  modified_base 1: mod_base = OTHER; note = 2'-OMe modified nucleotide
  modified_base 3: mod_base = OTHER; note = 2'-OMe modified nucleotide
  modified_base 5: mod_base = OTHER; note = 2'-OMe modified nucleotide
  modified_base 7..11: mod_base = OTHER; note = 2'-OMe modified nucleotide
  modified_base 13: mod_base = OTHER; note = 2'-OMe modified nucleotide
  modified_base 15: mod_base = OTHER; note = 2'-OMe modified nucleotide
  modified_base 17: mod_base = OTHER; note = 2'-OMe modified nucleotide
  modified_base 19: mod_base = OTHER; note = 2'-OMe modified nucleotide
  modified_base 21: mod_base = OTHER; note = 2'-OMe modified nucleotide
  modified_base 23..24: mod_base = OTHER; note = 2'-OMe modified nucleotide
  modified_base 2: mod_base = OTHER; note = 2-deoxy-2-fluoro ribonucleotide
  modified_base 4: mod_base = OTHER; note = 2-deoxy-2-fluoro ribonucleotide
  modified_base 6: mod_base = OTHER; note = 2-deoxy-2-fluoro ribonucleotide
  modified_base 12: mod_base = OTHER; note = 2-deoxy-2-fluoro ribonucleotide
  modified_base 14: mod_base = OTHER; note = 2-deoxy-2-fluoro ribonucleotide
  modified_base 16: mod_base = OTHER; note = 2-deoxy-2-fluoro ribonucleotide
  modified_base 18: mod_base = OTHER; note = 2-deoxy-2-fluoro ribonucleotide
  modified_base 20: mod_base = OTHER; note = 2-deoxy-2-fluoro ribonucleotide
  modified_base 22: mod_base = OTHER; note = 2-deoxy-2-fluoro ribonucleotide
  modified_base 1..2: mod_base = OTHER; note = phosphorothioate internucleotide linkage
  modified_base 2..3: mod_base = OTHER; note = phosphorothioate internucleotide linkage
  modified_base 22..23: mod_base = OTHER; note = phosphorothioate internucleotide linkage
  modified_base 23..24: mod_base = OTHER; note = phosphorothioate internucleotide linkage
tcgtataacaataaggggctgctt

SEQ ID NO: 784 - RNA, 26 nt, synthetic construct
  source 1..26: mol_type = other RNA
  modified_base 1: mod_base = OTHER; note = 2'-OMe modified nucleotide
  modified_base 3: mod_base = OTHER; note = 2'-OMe modified nucleotide
  modified_base 5: mod_base = OTHER; note = 2'-OMe modified nucleotide
  modified_base 7: mod_base = OTHER; note = 2'-OMe modified nucleotide
  modified_base 10..13: mod_base = OTHER; note = 2'-OMe modified nucleotide
  modified_base 15: mod_base = OTHER; note = 2'-OMe modified nucleotide
  modified_base 17: mod_base = OTHER; note = 2'-OMe modified nucleotide
  modified_base 19: mod_base = OTHER; note = 2'-OMe modified nucleotide
  modified_base 21: mod_base = OTHER; note = 2'-OMe modified nucleotide
  modified_base 23..24: mod_base = OTHER; note = 2'-OMe modified nucleotide
  modified_base 26: mod_base = OTHER; note = 2'-OMe modified nucleotide
  modified_base 2: mod_base = OTHER; note = 2-deoxy-2-fluoro ribonucleotide
  modified_base 4: mod_base = OTHER; note = 2-deoxy-2-fluoro ribonucleotide
  modified_base 6: mod_base = OTHER; note = 2-deoxy-2-fluoro ribonucleotide
  modified_base 8..9: mod_base = OTHER; note = 2-deoxy-2-fluoro ribonucleotide
  modified_base 14: mod_base = OTHER; note = 2-deoxy-2-fluoro ribonucleotide
  modified_base 16: mod_base = OTHER; note = 2-deoxy-2-fluoro ribonucleotide
  modified_base 18: mod_base = OTHER; note = 2-deoxy-2-fluoro ribonucleotide
  modified_base 20: mod_base = OTHER; note = 2-deoxy-2-fluoro ribonucleotide
  modified_base 22: mod_base = OTHER; note = 2-deoxy-2-fluoro ribonucleotide
  modified_base 1..2: mod_base = OTHER; note = phosphorothioate internucleotide linkage
  modified_base 2..3: mod_base = OTHER; note = phosphorothioate internucleotide linkage
  modified_base 21..22: mod_base = OTHER; note = phosphorothioate internucleotide linkage
  modified_base 22..23: mod_base = OTHER; note = phosphorothioate internucleotide linkage
tgagaatgagcctcgataactcttat

SEQ ID NO: 785 - RNA, 26 nt, synthetic construct
  source 1..26: mol_type = other RNA
  modified_base 1: mod_base = OTHER; note = cyclopropyl phosphonate
  modified_base 1: mod_base = OTHER; note = 2'-OMe modified nucleotide
  modified_base 3: mod_base = OTHER; note = 2'-OMe modified nucleotide
  modified_base 5: mod_base = OTHER; note = 2'-OMe modified nucleotide
  modified_base 7: mod_base = OTHER; note = 2'-OMe modified nucleotide
  modified_base 9: mod_base = OTHER; note = 2'-OMe modified nucleotide
  modified_base 11..13: mod_base = OTHER; note = 2'-OMe modified nucleotide
  modified_base 15: mod_base = OTHER; note = 2'-OMe modified nucleotide
  modified_base 17: mod_base = OTHER; note = 2'-OMe modified nucleotide
  modified_base 19: mod_base = OTHER; note = 2'-OMe modified nucleotide
  modified_base 21..24: mod_base = OTHER; note = 2'-OMe modified nucleotide
  modified_base 26: mod_base = OTHER; note = 2'-OMe modified nucleotide
  modified_base 2: mod_base = OTHER; note = 2-deoxy-2-fluoro ribonucleotide
  modified_base 4: mod_base = OTHER; note = 2-deoxy-2-fluoro ribonucleotide
  modified_base 6: mod_base = OTHER; note = 2-deoxy-2-fluoro ribonucleotide
  modified_base 8: mod_base = OTHER; note = 2-deoxy-2-fluoro ribonucleotide
  modified_base 10: mod_base = OTHER; note = 2-deoxy-2-fluoro ribonucleotide
  modified_base 14: mod_base = OTHER; note = 2-deoxy-2-fluoro ribonucleotide
  modified_base 16: mod_base = OTHER; note = 2-deoxy-2-fluoro ribonucleotide
  modified_base 18: mod_base = OTHER; note = 2-deoxy-2-fluoro ribonucleotide
  modified_base 20: mod_base = OTHER; note = 2-deoxy-2-fluoro ribonucleotide
  modified_base 1..2: mod_base = OTHER; note = phosphorothioate internucleotide linkage
  modified_base 2..3: mod_base = OTHER; note = phosphorothioate internucleotide linkage
  modified_base 22..23: mod_base = OTHER; note = phosphorothioate internucleotide linkage
  modified_base 23..24: mod_base = OTHER; note = phosphorothioate internucleotide linkage
tgagaatgagcctcgataactcttat

SEQ ID NO: 786 - RNA, 26 nt, synthetic construct
  source 1..26: mol_type = other RNA
  modified_base 1: mod_base = OTHER; note = cyclopropyl phosphonate
  modified_base 1: mod_base = OTHER; note = 2'-OMe modified nucleotide
  modified_base 3: mod_base = OTHER; note = 2'-OMe modified nucleotide
  modified_base 5: mod_base = OTHER; note = 2'-OMe modified nucleotide
  modified_base 7..11: mod_base = OTHER; note = 2'-OMe modified nucleotide
  modified_base 13: mod_base = OTHER; note = 2'-OMe modified nucleotide
  modified_base 15: mod_base = OTHER; note = 2'-OMe modified nucleotide
  modified_base 17: mod_base = OTHER; note = 2'-OMe modified nucleotide
  modified_base 19: mod_base = OTHER; note = 2'-OMe modified nucleotide
  modified_base 21: mod_base = OTHER; note = 2'-OMe modified nucleotide
  modified_base 23..24: mod_base = OTHER; note = 2'-OMe modified nucleotide
  modified_base 26: mod_base = OTHER; note = 2'-OMe modified nucleotide
  modified_base 2: mod_base = OTHER; note = 2-deoxy-2-fluoro ribonucleotide
  modified_base 4: mod_base = OTHER; note = 2-deoxy-2-fluoro ribonucleotide
  modified_base 6: mod_base = OTHER; note = 2-deoxy-2-fluoro ribonucleotide
  modified_base 12: mod_base = OTHER; note = 2-deoxy-2-fluoro ribonucleotide
  modified_base 14: mod_base = OTHER; note = 2-deoxy-2-fluoro ribonucleotide
  modified_base 16: mod_base = OTHER; note = 2-deoxy-2-fluoro ribonucleotide
  modified_base 18: mod_base = OTHER; note = 2-deoxy-2-fluoro ribonucleotide
  modified_base 20: mod_base = OTHER; note = 2-deoxy-2-fluoro ribonucleotide
  modified_base 22: mod_base = OTHER; note = 2-deoxy-2-fluoro ribonucleotide
  modified_base 1..2: mod_base = OTHER; note = phosphorothioate internucleotide linkage
  modified_base 2..3: mod_base = OTHER; note = phosphorothioate internucleotide linkage
  modified_base 22..23: mod_base = OTHER; note = phosphorothioate internucleotide linkage
  modified_base 23..24: mod_base = OTHER; note = phosphorothioate internucleotide linkage
tcgtataacaataaggggctgcctat

SEQ ID NO: 787 - RNA, 21 nt, synthetic construct
  source 1..21: mol_type = other RNA
  modified_base 1: mod_base = OTHER; note = 2'-OMe modified nucleotide
  modified_base 3: mod_base = OTHER; note = 2'-OMe modified nucleotide
  modified_base 5: mod_base = OTHER; note = 2'-OMe modified nucleotide
  modified_base 7..11: mod_base = OTHER; note = 2'-OMe modified nucleotide
  modified_base 13: mod_base = OTHER; note = 2'-OMe modified nucleotide
  modified_base 15: mod_base = OTHER; note = 2'-OMe modified nucleotide
  modified_base 17: mod_base = OTHER; note = 2'-OMe modified nucleotide
  modified_base 19..21: mod_base = OTHER; note = 2'-OMe modified nucleotide
  modified_base 2: mod_base = OTHER; note = 2-deoxy-2-fluoro ribonucleotide
  modified_base 4: mod_base = OTHER; note = 2-deoxy-2-fluoro ribonucleotide
  modified_base 6: mod_base = OTHER; note = 2-deoxy-2-fluoro ribonucleotide
  modified_base 12: mod_base = OTHER; note = 2-deoxy-2-fluoro ribonucleotide
  modified_base 14: mod_base = OTHER; note = 2-deoxy-2-fluoro ribonucleotide
  modified_base 16: mod_base = OTHER; note = 2-deoxy-2-fluoro ribonucleotide
  modified_base 18: mod_base = OTHER; note = 2-deoxy-2-fluoro ribonucleotide
  modified_base 1..2: mod_base = OTHER; note = phosphorothioate internucleotide linkage
  modified_base 2..3: mod_base = OTHER; note = phosphorothioate internucleotide linkage
  modified_base 19..20: mod_base = OTHER; note = phosphorothioate internucleotide linkage
  modified_base 20..21: mod_base = OTHER; note = phosphorothioate internucleotide linkage
tcgtataacaataaggggctt

SEQ ID NO: 788 - RNA, 21 nt, synthetic construct
  source 1..21: mol_type = other RNA
  modified_base 1: mod_base = OTHER; note = cyclopropyl phosphonate
  modified_base 1: mod_base = OTHER; note = 2'-OMe modified nucleotide
  modified_base 3: mod_base = OTHER; note = 2'-OMe modified nucleotide
  modified_base 5: mod_base = OTHER; note = 2'-OMe modified nucleotide
  modified_base 7..11: mod_base = OTHER; note = 2'-OMe modified nucleotide
  modified_base 13: mod_base = OTHER; note = 2'-OMe modified nucleotide
  modified_base 15: mod_base = OTHER; note = 2'-OMe modified nucleotide
  modified_base 17: mod_base = OTHER; note = 2'-OMe modified nucleotide
  modified_base 19..21: mod_base = OTHER; note = 2'-OMe modified nucleotide
  modified_base 2: mod_base = OTHER; note = 2-deoxy-2-fluoro ribonucleotide
  modified_base 4: mod_base = OTHER; note = 2-deoxy-2-fluoro ribonucleotide
  modified_base 6: mod_base = OTHER; note = 2-deoxy-2-fluoro ribonucleotide
  modified_base 12: mod_base = OTHER; note = 2-deoxy-2-fluoro ribonucleotide
  modified_base 14: mod_base = OTHER; note = 2-deoxy-2-fluoro ribonucleotide
  modified_base 16: mod_base = OTHER; note = 2-deoxy-2-fluoro ribonucleotide
  modified_base 18: mod_base = OTHER; note = 2-deoxy-2-fluoro ribonucleotide
  modified_base 1..2: mod_base = OTHER; note = phosphorothioate internucleotide linkage
  modified_base 2..3: mod_base = OTHER; note = phosphorothioate internucleotide linkage
  modified_base 19..20: mod_base = OTHER; note = phosphorothioate internucleotide linkage
  modified_base 20..21: mod_base = OTHER; note = phosphorothioate internucleotide linkage
tcgtataacaataaggggctt

SEQ ID NO: 789 - RNA, 21 nt, synthetic construct
  source 1..21: mol_type = other RNA
  modified_base 1: mod_base = OTHER; note = 2'-OMe modified nucleotide
  modified_base 3: mod_base = OTHER; note = 2'-OMe modified nucleotide
  modified_base 5: mod_base = OTHER; note = 2'-OMe modified nucleotide
  modified_base 7..11: mod_base = OTHER; note = 2'-OMe modified nucleotide
  modified_base 13: mod_base = OTHER; note = 2'-OMe modified nucleotide
  modified_base 15: mod_base = OTHER; note = 2'-OMe modified nucleotide
  modified_base 17: mod_base = OTHER; note = 2'-OMe modified nucleotide
  modified_base 19..21: mod_base = OTHER; note = 2'-OMe modified nucleotide
  modified_base 2: mod_base = OTHER; note = 2-deoxy-2-fluoro ribonucleotide
  modified_base 4: mod_base = OTHER; note = 2-deoxy-2-fluoro ribonucleotide
  modified_base 6: mod_base = OTHER; note = 2-deoxy-2-fluoro ribonucleotide
  modified_base 12: mod_base = OTHER; note = 2-deoxy-2-fluoro ribonucleotide
  modified_base 14: mod_base = OTHER; note = 2-deoxy-2-fluoro ribonucleotide
  modified_base 16: mod_base = OTHER; note = 2-deoxy-2-fluoro ribonucleotide
  modified_base 18: mod_base = OTHER; note = 2-deoxy-2-fluoro ribonucleotide
  modified_base 1..2: mod_base = OTHER; note = phosphorothioate internucleotide linkage
  modified_base 2..3: mod_base = OTHER; note = phosphorothioate internucleotide linkage
  modified_base 19..20: mod_base = OTHER; note = phosphorothioate internucleotide linkage
  modified_base 20..21: mod_base = OTHER; note = phosphorothioate internucleotide linkage
tcgtataacaataaggggctg

SEQ ID NO: 790 - RNA, 21 nt, synthetic construct
  source 1..21: mol_type = other RNA
  modified_base 1: mod_base = OTHER; note = 2'-OMe modified nucleotide
  modified_base 3: mod_base = OTHER; note = 2'-OMe modified nucleotide
  modified_base 5: mod_base = OTHER; note = 2'-OMe modified nucleotide
  modified_base 7..11: mod_base = OTHER; note = 2'-OMe modified nucleotide
  modified_base 13: mod_base = OTHER; note = 2'-OMe modified nucleotide
  modified_base 15: mod_base = OTHER; note = 2'-OMe modified nucleotide
  modified_base 17: mod_base = OTHER; note = 2'-OMe modified nucleotide
  modified_base 19: mod_base = OTHER; note = 2'-OMe modified nucleotide
  modified_base 21: mod_base = OTHER; note = 2'-OMe modified nucleotide
  modified_base 2: mod_base = OTHER; note = 2-deoxy-2-fluoro ribonucleotide
  modified_base 4: mod_base = OTHER; note = 2-deoxy-2-fluoro ribonucleotide
  modified_base 6: mod_base = OTHER; note = 2-deoxy-2-fluoro ribonucleotide
  modified_base 12: mod_base = OTHER; note = 2-deoxy-2-fluoro ribonucleotide
  modified_base 14: mod_base = OTHER; note = 2-deoxy-2-fluoro ribonucleotide
  modified_base 16: mod_base = OTHER; note = 2-deoxy-2-fluoro ribonucleotide
  modified_base 18: mod_base = OTHER; note = 2-deoxy-2-fluoro ribonucleotide
  modified_base 20: mod_base = OTHER; note = 2-deoxy-2-fluoro ribonucleotide
  modified_base 1..2: mod_base = OTHER; note = phosphorothioate internucleotide linkage
  modified_base 2..3: mod_base = OTHER; note = phosphorothioate internucleotide linkage
  modified_base 19..20: mod_base = OTHER; note = phosphorothioate internucleotide linkage
  modified_base 20..21: mod_base = OTHER; note = phosphorothioate internucleotide linkage
tcgtataacaataaggggctg

SEQ ID NO: 791 - RNA, 24 nt, synthetic construct
  source 1..24: mol_type = other RNA
  modified_base 1: mod_base = OTHER; note = cyclopropyl phosphonate
  modified_base 1: mod_base = OTHER; note = 2'-OMe modified nucleotide
  modified_base 3: mod_base = OTHER; note = 2'-OMe modified nucleotide
  modified_base 5: mod_base = OTHER; note = 2'-OMe modified nucleotide
  modified_base 7..11: mod_base = OTHER; note = 2'-OMe modified nucleotide
  modified_base 13: mod_base = OTHER; note = 2'-OMe modified nucleotide
  modified_base 15: mod_base = OTHER; note = 2'-OMe modified nucleotide
  modified_base 17: mod_base = OTHER; note = 2'-OMe modified nucleotide
  modified_base 19: mod_base = OTHER; note = 2'-OMe modified nucleotide
  modified_base 21: mod_base = OTHER; note = 2'-OMe modified nucleotide
  modified_base 23..24: mod_base = OTHER; note = 2'-OMe modified nucleotide
  modified_base 2: mod_base = OTHER; note = 2-deoxy-2-fluoro ribonucleotide
  modified_base 4: mod_base = OTHER; note = 2-deoxy-2-fluoro ribonucleotide
  modified_base 6: mod_base = OTHER; note = 2-deoxy-2-fluoro ribonucleotide
  modified_base 12: mod_base = OTHER; note = 2-deoxy-2-fluoro ribonucleotide
  modified_base 14: mod_base = OTHER; note = 2-deoxy-2-fluoro ribonucleotide
  modified_base 16: mod_base = OTHER; note = 2-deoxy-2-fluoro ribonucleotide
  modified_base 18: mod_base = OTHER; note = 2-deoxy-2-fluoro ribonucleotide
  modified_base 20: mod_base = OTHER; note = 2-deoxy-2-fluoro ribonucleotide
  modified_base 22: mod_base = OTHER; note = 2-deoxy-2-fluoro ribonucleotide
  modified_base 1..2: mod_base = OTHER; note = phosphorothioate internucleotide linkage
  modified_base 2..3: mod_base = OTHER; note = phosphorothioate internucleotide linkage
  modified_base 22..23: mod_base = OTHER; note = phosphorothioate internucleotide linkage
  modified_base 23..24: mod_base = OTHER; note = phosphorothioate internucleotide linkage
tcgtataacaataaggggctgctt

SEQ ID NO: 792 - RNA, 26 nt, synthetic construct
  source 1..26: mol_type = other RNA
  modified_base 1: mod_base = OTHER; note = 2'-OMe modified nucleotide
  modified_base 3: mod_base = OTHER; note = 2'-OMe modified nucleotide
  modified_base 5: mod_base = OTHER; note = 2'-OMe modified nucleotide
  modified_base 7: mod_base = OTHER; note = 2'-OMe modified nucleotide
  modified_base 9: mod_base = OTHER; note = 2'-OMe modified nucleotide
  modified_base 11: mod_base = OTHER; note = 2'-OMe modified nucleotide
  modified_base 13: mod_base = OTHER; note = 2'-OMe modified nucleotide
  modified_base 15: mod_base = OTHER; note = 2'-OMe modified nucleotide
  modified_base 17: mod_base = OTHER; note = 2'-OMe modified nucleotide
  modified_base 19: mod_base = OTHER; note = 2'-OMe modified nucleotide
  modified_base 21..24: mod_base = OTHER; note = 2'-OMe modified nucleotide
  modified_base 26: mod_base = OTHER; note = 2'-OMe modified nucleotide
  modified_base 2: mod_base = OTHER; note = 2-deoxy-2-fluoro ribonucleotide
  modified_base 4: mod_base = OTHER; note = 2-deoxy-2-fluoro ribonucleotide
  modified_base 6: mod_base = OTHER; note = 2-deoxy-2-fluoro ribonucleotide
  modified_base 8: mod_base = OTHER; note = 2-deoxy-2-fluoro ribonucleotide
  modified_base 10: mod_base = OTHER; note = 2-deoxy-2-fluoro ribonucleotide
  modified_base 12: mod_base = OTHER; note = 2-deoxy-2-fluoro ribonucleotide
  modified_base 14: mod_base = OTHER; note = 2-deoxy-2-fluoro ribonucleotide
  modified_base 16: mod_base = OTHER; note = 2-deoxy-2-fluoro ribonucleotide
  modified_base 18: mod_base = OTHER; note = 2-deoxy-2-fluoro ribonucleotide
  modified_base 20: mod_base = OTHER; note = 2-deoxy-2-fluoro ribonucleotide
  modified_base 1..2: mod_base = OTHER; note = phosphorothioate internucleotide linkage
  modified_base 2..3: mod_base = OTHER; note = phosphorothioate internucleotide linkage
  modified_base 22..23: mod_base = OTHER; note = phosphorothioate internucleotide linkage
  modified_base 23..24: mod_base = OTHER; note = phosphorothioate internucleotide linkage
tgagaatgagcctcgataactcttat

SEQ ID NO: 793 - RNA, 26 nt, synthetic construct
  source 1..26: mol_type = other RNA
  modified_base 1: mod_base = OTHER; note = cyclopropyl phosphonate
  modified_base 1: mod_base = OTHER; note = 2'-OMe modified nucleotide
  modified_base 3: mod_base = OTHER; note = 2'-OMe modified nucleotide
  modified_base 5: mod_base = OTHER; note = 2'-OMe modified nucleotide
  modified_base 7: mod_base = OTHER; note = 2'-OMe modified nucleotide
  modified_base 9: mod_base = OTHER; note = 2'-OMe modified nucleotide
  modified_base 11: mod_base = OTHER; note = 2'-OMe modified nucleotide
  modified_base 13: mod_base = OTHER; note = 2'-OMe modified nucleotide
  modified_base 15: mod_base = OTHER; note = 2'-OMe modified nucleotide
  modified_base 17: mod_base = OTHER; note = 2'-OMe modified nucleotide
  modified_base 19: mod_base = OTHER; note = 2'-OMe modified nucleotide
  modified_base 21..24: mod_base = OTHER; note = 2'-OMe modified nucleotide
  modified_base 26: mod_base = OTHER; note = 2'-OMe modified nucleotide
  modified_base 2: mod_base = OTHER; note = 2-deoxy-2-fluoro ribonucleotide
  modified_base 4: mod_base = OTHER; note = 2-deoxy-2-fluoro ribonucleotide
  modified_base 6: mod_base = OTHER; note = 2-deoxy-2-fluoro ribonucleotide
  modified_base 8: mod_base = OTHER; note = 2-deoxy-2-fluoro ribonucleotide
  modified_base 10: mod_base = OTHER; note = 2-deoxy-2-fluoro ribonucleotide
  modified_base 12: mod_base = OTHER; note = 2-deoxy-2-fluoro ribonucleotide
  modified_base 14: mod_base = OTHER; note = 2-deoxy-2-fluoro ribonucleotide
  modified_base 16: mod_base = OTHER; note = 2-deoxy-2-fluoro ribonucleotide
  modified_base 18: mod_base = OTHER; note = 2-deoxy-2-fluoro ribonucleotide
  modified_base 20: mod_base = OTHER; note = 2-deoxy-2-fluoro ribonucleotide
  modified_base 1..2: mod_base = OTHER; note = phosphorothioate internucleotide linkage
  modified_base 2..3: mod_base = OTHER; note = phosphorothioate internucleotide linkage
  modified_base 22..23: mod_base = OTHER; note = phosphorothioate internucleotide linkage
  modified_base 23..24: mod_base = OTHER; note = phosphorothioate internucleotide linkage
tgagaatgagcctcgataactcttat

SEQ ID NO: 794 - RNA, 26 nt, synthetic construct
  source 1..26: mol_type = other RNA
  modified_base 1: mod_base = OTHER; note = cyclopropyl phosphonate
  modified_base 1: mod_base = OTHER; note = 2'-methoxyethyl nucleotide
  modified_base 3: mod_base = OTHER; note = 2'-OMe modified nucleotide
  modified_base 5: mod_base = OTHER; note = 2'-OMe modified nucleotide
  modified_base 7: mod_base = OTHER; note = 2'-OMe modified nucleotide
  modified_base 9: mod_base = OTHER; note = 2'-OMe modified nucleotide
  modified_base 11: mod_base = OTHER; note = 2'-OMe modified nucleotide
  modified_base 13: mod_base = OTHER; note = 2'-OMe modified nucleotide
  modified_base 15: mod_base = OTHER; note = 2'-OMe modified nucleotide
  modified_base 17: mod_base = OTHER; note = 2'-OMe modified nucleotide
  modified_base 19: mod_base = OTHER; note = 2'-OMe modified nucleotide
  modified_base 21..24: mod_base = OTHER; note = 2'-OMe modified nucleotide
  modified_base 26: mod_base = OTHER; note = 2'-OMe modified nucleotide
  modified_base 2: mod_base = OTHER; note = 2-deoxy-2-fluoro ribonucleotide
  modified_base 4: mod_base = OTHER; note = 2-deoxy-2-fluoro ribonucleotide
  modified_base 6: mod_base = OTHER; note = 2-deoxy-2-fluoro ribonucleotide
  modified_base 8: mod_base = OTHER; note = 2-deoxy-2-fluoro ribonucleotide
  modified_base 10: mod_base = OTHER; note = 2-deoxy-2-fluoro ribonucleotide
  modified_base 12: mod_base = OTHER; note = 2-deoxy-2-fluoro ribonucleotide
  modified_base 14: mod_base = OTHER; note = 2-deoxy-2-fluoro ribonucleotide
  modified_base 16: mod_base = OTHER; note = 2-deoxy-2-fluoro ribonucleotide
  modified_base 18: mod_base = OTHER; note = 2-deoxy-2-fluoro ribonucleotide
  modified_base 20: mod_base = OTHER; note = 2-deoxy-2-fluoro ribonucleotide
  modified_base 1..2: mod_base = OTHER; note = phosphorothioate internucleotide linkage
  modified_base 2..3: mod_base = OTHER; note = phosphorothioate internucleotide linkage
  modified_base 22..23: mod_base = OTHER; note = phosphorothioate internucleotide linkage
  modified_base 23..24: mod_base = OTHER; note = phosphorothioate internucleotide linkage
  modified_base 1: mod_base = OTHER; note = Thymine
tgagaatgagcctcgataactcttat

SEQ ID NO: 795 - RNA, 26 nt, synthetic construct
  source 1..26: mol_type = other RNA
  modified_base 1: mod_base = OTHER; note = cyclopropyl phosphonate
  modified_base 1: mod_base = OTHER; note = 2'-methoxyethyl nucleotide
  modified_base 3: mod_base = OTHER; note = 2'-OMe modified nucleotide
  modified_base 5: mod_base = OTHER; note = 2'-OMe modified nucleotide
  modified_base 7..11: mod_base = OTHER; note = 2'-OMe modified nucleotide
  modified_base 13: mod_base = OTHER; note = 2'-OMe modified nucleotide
  modified_base 15: mod_base = OTHER; note = 2'-OMe modified nucleotide
  modified_base 17: mod_base = OTHER; note = 2'-OMe modified nucleotide
  modified_base 19: mod_base = OTHER; note = 2'-OMe modified nucleotide
  modified_base 21: mod_base = OTHER; note = 2'-OMe modified nucleotide
  modified_base 23..24: mod_base = OTHER; note = 2'-OMe modified nucleotide
  modified_base 26: mod_base = OTHER; note = 2'-OMe modified nucleotide
  modified_base 2: mod_base = OTHER; note = 2-deoxy-2-fluoro ribonucleotide
  modified_base 4: mod_base = OTHER; note = 2-deoxy-2-fluoro ribonucleotide
  modified_base 6: mod_base = OTHER; note = 2-deoxy-2-fluoro ribonucleotide
  modified_base 12: mod_base = OTHER; note = 2-deoxy-2-fluoro ribonucleotide
  modified_base 14: mod_base = OTHER; note = 2-deoxy-2-fluoro ribonucleotide
  modified_base 16: mod_base = OTHER; note = 2-deoxy-2-fluoro ribonucleotide
  modified_base 18: mod_base = OTHER; note = 2-deoxy-2-fluoro ribonucleotide
  modified_base 20: mod_base = OTHER; note = 2-deoxy-2-fluoro ribonucleotide
  modified_base 22: mod_base = OTHER; note = 2-deoxy-2-fluoro ribonucleotide
  modified_base 1..2: mod_base = OTHER; note = phosphorothioate internucleotide linkage
  modified_base 2..3: mod_base = OTHER; note = phosphorothioate internucleotide linkage
  modified_base 22..23: mod_base = OTHER; note = phosphorothioate internucleotide linkage
  modified_base 23..24: mod_base = OTHER; note = phosphorothioate internucleotide linkage
  modified_base 1: mod_base = OTHER; note = Thymine
tcgtataacaataaggggctgcctat

SEQ ID NO: 796 - RNA, 21 nt, synthetic construct
  source 1..21: mol_type = other RNA
  modified_base 1: mod_base = OTHER; note = cyclopropyl phosphonate
  modified_base 1: mod_base = OTHER; note = 2'-methoxyethyl nucleotide
  modified_base 3: mod_base = OTHER; note = 2'-OMe modified nucleotide
  modified_base 5: mod_base = OTHER; note = 2'-OMe modified nucleotide
  modified_base 7..11: mod_base = OTHER; note = 2'-OMe modified nucleotide
  modified_base 13: mod_base = OTHER; note = 2'-OMe modified nucleotide
  modified_base 15: mod_base = OTHER; note = 2'-OMe modified nucleotide
  modified_base 17: mod_base = OTHER; note = 2'-OMe modified nucleotide
  modified_base 19..21: mod_base = OTHER; note = 2'-OMe modified nucleotide
  modified_base 2: mod_base = OTHER; note = 2-deoxy-2-fluoro ribonucleotide
  modified_base 4: mod_base = OTHER; note = 2-deoxy-2-fluoro ribonucleotide
  modified_base 6: mod_base = OTHER; note = 2-deoxy-2-fluoro ribonucleotide
  modified_base 12: mod_base = OTHER; note = 2-deoxy-2-fluoro ribonucleotide
  modified_base 14: mod_base = OTHER; note = 2-deoxy-2-fluoro ribonucleotide
  modified_base 16: mod_base = OTHER; note = 2-deoxy-2-fluoro ribonucleotide
  modified_base 18: mod_base = OTHER; note = 2-deoxy-2-fluoro ribonucleotide
  modified_base 1..2: mod_base = OTHER; note = phosphorothioate internucleotide linkage
  modified_base 2..3: mod_base = OTHER; note = phosphorothioate internucleotide linkage
  modified_base 19..20: mod_base = OTHER; note = phosphorothioate internucleotide linkage
  modified_base 20..21: mod_base = OTHER; note = phosphorothioate internucleotide linkage
  modified_base 1: mod_base = OTHER; note = Thymine
tcgtataacaataaggggctt

SEQ ID NO: 797 - RNA, 24 nt, synthetic construct
  source 1..24: mol_type = other RNA
  modified_base 1: mod_base = OTHER; note = cyclopropyl phosphonate
  modified_base 1: mod_base = OTHER; note = 2'-methoxyethyl nucleotide
  modified_base 3: mod_base = OTHER; note = 2'-OMe modified nucleotide
  modified_base 5: mod_base = OTHER; note = 2'-OMe modified nucleotide
  modified_base 7..11: mod_base = OTHER; note = 2'-OMe modified nucleotide
  modified_base 13: mod_base = OTHER; note = 2'-OMe modified nucleotide
  modified_base 15: mod_base = OTHER; note = 2'-OMe modified nucleotide
  modified_base 17: mod_base = OTHER; note = 2'-OMe modified nucleotide
  modified_base 19: mod_base = OTHER; note = 2'-OMe modified nucleotide
  modified_base 21: mod_base = OTHER; note = 2'-OMe modified nucleotide
  modified_base 23..24: mod_base = OTHER; note = 2'-OMe modified nucleotide
  modified_base 2: mod_base = OTHER; note = 2-deoxy-2-fluoro ribonucleotide
  modified_base 4: mod_base = OTHER; note = 2-deoxy-2-fluoro ribonucleotide
  modified_base 6: mod_base = OTHER; note = 2-deoxy-2-fluoro ribonucleotide
  modified_base 12: mod_base = OTHER; note = 2-deoxy-2-fluoro ribonucleotide
  modified_base 14: mod_base = OTHER; note = 2-deoxy-2-fluoro ribonucleotide
  modified_base 16: mod_base = OTHER; note = 2-deoxy-2-fluoro ribonucleotide
  modified_base 18: mod_base = OTHER; note = 2-deoxy-2-fluoro ribonucleotide
  modified_base 20: mod_base = OTHER; note = 2-deoxy-2-fluoro ribonucleotide
  modified_base 22: mod_base = OTHER; note = 2-deoxy-2-fluoro ribonucleotide
  modified_base 1..2: mod_base = OTHER; note = phosphorothioate internucleotide linkage
  modified_base 2..3: mod_base = OTHER; note = phosphorothioate internucleotide linkage
  modified_base 22..23: mod_base = OTHER; note = phosphorothioate internucleotide linkage
  modified_base 23..24: mod_base = OTHER; note = phosphorothioate internucleotide linkage
  modified_base 1: mod_base = OTHER; note = Thymine
tcgtataacaataaggggctgctt

SEQ ID NO: 798 - RNA, 21 nt, synthetic construct
  source 1..21: mol_type = other RNA
  modified_base 1: mod_base = OTHER; note = 2'-OMe modified nucleotide
  modified_base 3: mod_base = OTHER; note = 2'-OMe modified nucleotide
  modified_base 5: mod_base = OTHER; note = 2'-OMe modified nucleotide
  modified_base 7: mod_base = OTHER; note = 2'-OMe modified nucleotide
  modified_base 9: mod_base = OTHER; note = 2'-OMe modified nucleotide
  modified_base 11: mod_base = OTHER; note = 2'-OMe modified nucleotide
  modified_base 13: mod_base = OTHER; note = 2'-OMe modified nucleotide
  modified_base 15: mod_base = OTHER; note = 2'-OMe modified nucleotide
  modified_base 17: mod_base = OTHER; note = 2'-OMe modified nucleotide
  modified_base 19..21: mod_base = OTHER; note = 2'-OMe modified nucleotide
  modified_base 2: mod_base = OTHER; note = 2-deoxy-2-fluoro ribonucleotide
  modified_base 4: mod_base = OTHER; note = 2-deoxy-2-fluoro ribonucleotide
  modified_base 6: mod_base = OTHER; note = 2-deoxy-2-fluoro ribonucleotide
  modified_base 8: mod_base = OTHER; note = 2-deoxy-2-fluoro ribonucleotide
  modified_base 10: mod_base = OTHER; note = 2-deoxy-2-fluoro ribonucleotide
  modified_base 12: mod_base = OTHER; note = 2-deoxy-2-fluoro ribonucleotide
  modified_base 14: mod_base = OTHER; note = 2-deoxy-2-fluoro ribonucleotide
  modified_base 16: mod_base = OTHER; note = 2-deoxy-2-fluoro ribonucleotide
  modified_base 18: mod_base = OTHER; note = 2-deoxy-2-fluoro ribonucleotide
  modified_base 1..2: mod_base = OTHER; note = phosphorothioate internucleotide linkage
  modified_base 2..3: mod_base = OTHER; note = phosphorothioate internucleotide linkage
  modified_base 3..4: mod_base = OTHER; note = phosphorothioate internucleotide linkage
  modified_base 20..21: mod_base = OTHER; note = phosphorothioate internucleotide linkage
tcgtataacaataaggggctt

SEQ ID NO: 799 - RNA, 26 nt, synthetic construct
  source 1..26: mol_type = other RNA
  modified_base 1..9: mod_base = OTHER; note = 2'-OMe modified nucleotide
  modified_base 11..13: mod_base = OTHER; note = 2'-OMe modified nucleotide
  modified_base 15: mod_base = OTHER; note = 2'-OMe modified nucleotide
  modified_base 17: mod_base = OTHER; note = 2'-OMe modified nucleotide
  modified_base 19: mod_base = OTHER; note = 2'-OMe modified nucleotide
  modified_base 21: mod_base = OTHER; note = 2'-OMe modified nucleotide
  modified_base 23..24: mod_base = OTHER; note = 2'-OMe modified nucleotide
  modified_base 26: mod_base = OTHER; note = 2'-OMe modified nucleotide
  modified_base 10: mod_base = OTHER; note = 2-deoxy-2-fluoro ribonucleotide
  modified_base 14: mod_base = OTHER; note = 2-deoxy-2-fluoro ribonucleotide
  modified_base 16: mod_base = OTHER; note = 2-deoxy-2-fluoro ribonucleotide
  modified_base 18: mod_base = OTHER; note = 2-deoxy-2-fluoro ribonucleotide
  modified_base 20: mod_base = OTHER; note = 2-deoxy-2-fluoro ribonucleotide
  modified_base 22: mod_base = OTHER; note = 2-deoxy-2-fluoro ribonucleotide
  modified_base 1..2: mod_base = OTHER; note = phosphorothioate internucleotide linkage
  modified_base 2..3: mod_base = OTHER; note = phosphorothioate internucleotide linkage
  modified_base 22..23: mod_base = OTHER; note = phosphorothioate internucleotide linkage
  modified_base 23..24: mod_base = OTHER; note = phosphorothioate internucleotide linkage
tgagaatgagcctcgataactcttat

SEQ ID NO: 800 - RNA, 26 nt, synthetic construct
  source 1..26: mol_type = other RNA
  modified_base 1..7: mod_base = OTHER; note = 2'-OMe modified nucleotide
  modified_base 9..13: mod_base = OTHER; note = 2'-OMe modified nucleotide
  modified_base 15: mod_base = OTHER; note = 2'-OMe modified nucleotide
  modified_base 17: mod_base = OTHER; note = 2'-OMe modified nucleotide
  modified_base 19: mod_base = OTHER; note = 2'-OMe modified nucleotide
  modified_base 21: mod_base = OTHER; note = 2'-OMe modified nucleotide
  modified_base 23..24: mod_base = OTHER; note = 2'-OMe modified nucleotide
  modified_base 26: mod_base = OTHER; note = 2'-OMe modified nucleotide
  modified_base 8: mod_base = OTHER; note = 2-deoxy-2-fluoro ribonucleotide
  modified_base 14: mod_base = OTHER; note = 2-deoxy-2-fluoro ribonucleotide
  modified_base 16: mod_base = OTHER; note = 2-deoxy-2-fluoro ribonucleotide
  modified_base 18: mod_base = OTHER; note = 2-deoxy-2-fluoro ribonucleotide
  modified_base 20: mod_base = OTHER; note = 2-deoxy-2-fluoro ribonucleotide
  modified_base 22: mod_base = OTHER; note = 2-deoxy-2-fluoro ribonucleotide
  modified_base 1..2: mod_base = OTHER; note = phosphorothioate internucleotide linkage
  modified_base 2..3: mod_base = OTHER; note = phosphorothioate internucleotide linkage
  modified_base 22..23: mod_base = OTHER; note = phosphorothioate internucleotide linkage
  modified_base 23..24: mod_base = OTHER; note = phosphorothioate internucleotide linkage
tgagaatgagcctcgataactcttat

SEQ ID NO: 801 - RNA, 26 nt, synthetic construct
  source 1..26: mol_type = other RNA
  modified_base 1..5: mod_base = OTHER; note = 2'-OMe modified nucleotide
  modified_base 7..13: mod_base = OTHER; note = 2'-OMe modified nucleotide
  modified_base 15: mod_base = OTHER; note = 2'-OMe modified nucleotide
  modified_base 17: mod_base = OTHER; note = 2'-OMe modified nucleotide
  modified_base 19: mod_base = OTHER; note = 2'-OMe modified nucleotide
  modified_base 21: mod_base = OTHER; note = 2'-OMe modified nucleotide
  modified_base 23..24: mod_base = OTHER; note = 2'-OMe modified nucleotide
  modified_base 26: mod_base = OTHER; note = 2'-OMe modified nucleotide
  modified_base 6: mod_base = OTHER; note = 2-deoxy-2-fluoro ribonucleotide
  modified_base 14: mod_base = OTHER; note = 2-deoxy-2-fluoro ribonucleotide
  modified_base 16: mod_base = OTHER; note = 2-deoxy-2-fluoro ribonucleotide
  modified_base 18: mod_base = OTHER; note = 2-deoxy-2-fluoro ribonucleotide
  modified_base 20: mod_base = OTHER; note = 2-deoxy-2-fluoro ribonucleotide
  modified_base 22: mod_base = OTHER; note = 2-deoxy-2-fluoro ribonucleotide
  modified_base 1..2: mod_base = OTHER; note = phosphorothioate internucleotide linkage
  modified_base 2..3: mod_base = OTHER; note = phosphorothioate internucleotide linkage
  modified_base 22..23: mod_base = OTHER; note = phosphorothioate internucleotide linkage
  modified_base 23..24: mod_base = OTHER; note = phosphorothioate internucleotide linkage
tgagaatgagcctcgataactcttat

SEQ ID NO: 802 - RNA, 26 nt, synthetic construct
  source 1..26: mol_type = other RNA
  modified_base 1..3: mod_base = OTHER; note = 2'-OMe modified nucleotide
  modified_base 5..13: mod_base = OTHER; note = 2'-OMe modified nucleotide
  modified_base 15: mod_base = OTHER; note = 2'-OMe modified nucleotide
  modified_base 17: mod_base = OTHER; note = 2'-OMe modified nucleotide
  modified_base 19: mod_base = OTHER; note = 2'-OMe modified nucleotide
  modified_base 21: mod_base = OTHER; note = 2'-OMe modified nucleotide
  modified_base 23..24: mod_base = OTHER; note = 2'-OMe modified nucleotide
  modified_base 26: mod_base = OTHER; note = 2'-OMe modified nucleotide
  modified_base 4: mod_base = OTHER; note = 2-deoxy-2-fluoro ribonucleotide
  modified_base 14: mod_base = OTHER; note = 2-deoxy-2-fluoro ribonucleotide
  modified_base 16: mod_base = OTHER; note = 2-deoxy-2-fluoro ribonucleotide
  modified_base 18: mod_base = OTHER; note = 2-deoxy-2-fluoro ribonucleotide
  modified_base 20: mod_base = OTHER; note = 2-deoxy-2-fluoro ribonucleotide
  modified_base 22: mod_base = OTHER; note = 2-deoxy-2-fluoro ribonucleotide
  modified_base 1..2: mod_base = OTHER; note = phosphorothioate internucleotide linkage
  modified_base 2..3: mod_base = OTHER; note = phosphorothioate internucleotide linkage
  modified_base 22..23: mod_base = OTHER; note = phosphorothioate internucleotide linkage
  modified_base 23..24: mod_base = OTHER; note = phosphorothioate internucleotide linkage
tgagaatgagcctcgataactcttat

SEQ ID NO: 803 - RNA, 26 nt, synthetic construct
  source 1..26: mol_type = other RNA
  modified_base 1: mod_base = OTHER; note = 2'-OMe modified nucleotide
  modified_base 3..13: mod_base = OTHER; note = 2'-OMe modified nucleotide
  modified_base 15: mod_base = OTHER; note = 2'-OMe modified nucleotide
  modified_base 17: mod_base = OTHER; note = 2'-OMe modified nucleotide
  modified_base 19: mod_base = OTHER; note = 2'-OMe modified nucleotide
  modified_base 21: mod_base = OTHER; note = 2'-OMe modified nucleotide
  modified_base 23..24: mod_base = OTHER; note = 2'-OMe modified nucleotide
  modified_base 26: mod_base = OTHER; note = 2'-OMe modified nucleotide
  modified_base 2: mod_base = OTHER; note = 2-deoxy-2-fluoro ribonucleotide
  modified_base 14: mod_base = OTHER; note = 2-deoxy-2-fluoro ribonucleotide
  modified_base 16: mod_base = OTHER; note = 2-deoxy-2-fluoro ribonucleotide
  modified_base 18: mod_base = OTHER; note = 2-deoxy-2-fluoro ribonucleotide
  modified_base 20: mod_base = OTHER; note = 2-deoxy-2-fluoro ribonucleotide
  modified_base 22: mod_base = OTHER; note = 2-deoxy-2-fluoro ribonucleotide
  modified_base 1..2: mod_base = OTHER; note = phosphorothioate internucleotide linkage
  modified_base 2..3: mod_base = OTHER; note = phosphorothioate internucleotide linkage
  modified_base 22..23: mod_base = OTHER; note = phosphorothioate internucleotide linkage
  modified_base 23..24: mod_base = OTHER; note = phosphorothioate internucleotide linkage
tgagaatgagcctcgataactcttat

SEQ ID NO: 804 - RNA, 26 nt, synthetic construct
  source 1..26: mol_type = other RNA
  modified_base 1: mod_base = OTHER; note = 2'-deoxy nucleotide
  modified_base 2..13: mod_base = OTHER; note = 2'-OMe modified nucleotide
  modified_base 15: mod_base = OTHER; note = 2'-OMe modified nucleotide
  modified_base 17: mod_base = OTHER; note = 2'-OMe modified nucleotide
  modified_base 19: mod_base = OTHER; note = 2'-OMe modified nucleotide
  modified_base 21: mod_base = OTHER; note = 2'-OMe modified nucleotide
  modified_base 23..24: mod_base = OTHER; note = 2'-OMe modified nucleotide
  modified_base 26: mod_base = OTHER; note = 2'-OMe modified nucleotide
  modified_base 14: mod_base = OTHER; note = 2-deoxy-2-fluoro ribonucleotide
  modified_base 16: mod_base = OTHER; note = 2-deoxy-2-fluoro ribonucleotide
  modified_base 18: mod_base = OTHER; note = 2-deoxy-2-fluoro ribonucleotide
  modified_base 20: mod_base = OTHER; note = 2-deoxy-2-fluoro ribonucleotide
  modified_base 22: mod_base = OTHER; note = 2-deoxy-2-fluoro ribonucleotide
  modified_base 1..2: mod_base = OTHER; note = phosphorothioate internucleotide linkage
  modified_base 2..3: mod_base = OTHER; note = phosphorothioate internucleotide linkage
  modified_base 22..23: mod_base = OTHER; note = phosphorothioate internucleotide linkage
  modified_base 23..24: mod_base = OTHER; note = phosphorothioate internucleotide linkage
  modified_base 1: mod_base = OTHER; note = Thymine
tgagaatgagcctcgataactcttat

SEQ ID NO: 805 - RNA, 26 nt, synthetic construct
  source 1..26: mol_type = other RNA
  modified_base 1: mod_base = OTHER; note = 2'-deoxy nucleotide
  modified_base 3: mod_base = OTHER; note = 2'-OMe modified nucleotide
  modified_base 5: mod_base = OTHER; note = 2'-OMe modified nucleotide
  modified_base 7: mod_base = OTHER; note = 2'-OMe modified nucleotide
  modified_base 8: mod_base = OTHER; note = 2'-OMe modified nucleotide
  modified_base 9: mod_base = OTHER; note = 2'-OMe modified nucleotide
  modified_base 10: mod_base = OTHER; note = 2'-OMe modified nucleotide
  modified_base 11: mod_base = OTHER; note = 2'-OMe modified nucleotide
  modified_base 12: mod_base = OTHER; note = 2'-OMe modified nucleotide
  modified_base 13: mod_base = OTHER; note = 2'-OMe modified nucleotide
  modified_base 15: mod_base = OTHER; note = 2'-OMe modified nucleotide
  modified_base 17: mod_base = OTHER; note = 2'-OMe modified nucleotide
  modified_base 19: mod_base = OTHER; note = 2'-OMe modified nucleotide
  modified_base 21: mod_base = OTHER; note = 2'-OMe modified nucleotide
  modified_base 23: mod_base = OTHER; note = 2'-OMe modified nucleotide
  modified_base 24: mod_base = OTHER; note = 2'-OMe modified nucleotide
  modified_base 26: mod_base = OTHER; note = 2'-OMe modified nucleotide
  modified_base 2: mod_base = OTHER; note = 2-deoxy-2-fluoro ribonucleotide
  modified_base 4: mod_base = OTHER; note = 2-deoxy-2-fluoro ribonucleotide
  modified_base 6: mod_base = OTHER; note = 2-deoxy-2-fluoro ribonucleotide
  modified_base 14: mod_base = OTHER; note = 2-deoxy-2-fluoro ribonucleotide
  modified_base 16: mod_base = OTHER; note = 2-deoxy-2-fluoro ribonucleotide
  modified_base 18: mod_base = OTHER; note = 2-deoxy-2-fluoro ribonucleotide
  modified_base 20: mod_base = OTHER; note = 2-deoxy-2-fluoro ribonucleotide
  modified_base 22: mod_base = OTHER; note = 2-deoxy-2-fluoro ribonucleotide
  modified_base 1..2: mod_base = OTHER; note = phosphorothioate internucleotide linkage
  modified_base 2..3: mod_base = OTHER; note = phosphorothioate internucleotide linkage
  modified_base 22..23: mod_base = OTHER; note = phosphorothioate internucleotide linkage
  modified_base 23..24: mod_base = OTHER; note = phosphorothioate internucleotide linkage
  modified_base 1: mod_base = OTHER; note = Thymine
tgagaatgagcctcgataactcttat

SEQ ID NO: 806 - RNA, 26 nt, synthetic construct
  source 1..26: mol_type = other RNA
  modified_base 1: mod_base = OTHER; note = 2'-deoxy nucleotide
  modified_base 3: mod_base = OTHER; note = 2'-OMe modified nucleotide
  modified_base 5: mod_base = OTHER; note = 2'-OMe modified nucleotide
  modified_base 7..9: mod_base = OTHER; note = 2'-OMe modified nucleotide
  modified_base 11..13: mod_base = OTHER; note = 2'-OMe modified nucleotide
  modified_base 15..17: mod_base = OTHER; note = 2'-OMe modified nucleotide
  modified_base 19: mod_base = OTHER; note = 2'-OMe modified nucleotide
  modified_base 21: mod_base = OTHER; note = 2'-OMe modified nucleotide
  modified_base 23..24: mod_base = OTHER; note = 2'-OMe modified nucleotide
  modified_base 26: mod_base = OTHER; note = 2'-OMe modified nucleotide
  modified_base 2: mod_base = OTHER; note = 2-deoxy-2-fluoro ribonucleotide
  modified_base 4: mod_base = OTHER; note = 2-deoxy-2-fluoro ribonucleotide
  modified_base 6: mod_base = OTHER; note = 2-deoxy-2-fluoro ribonucleotide
  modified_base 10: mod_base = OTHER; note = 2-deoxy-2-fluoro ribonucleotide
  modified_base 14: mod_base = OTHER; note = 2-deoxy-2-fluoro ribonucleotide
  modified_base 18: mod_base = OTHER; note = 2-deoxy-2-fluoro ribonucleotide
  modified_base 20: mod_base = OTHER; note = 2-deoxy-2-fluoro ribonucleotide
  modified_base 22: mod_base = OTHER; note = 2-deoxy-2-fluoro ribonucleotide
  modified_base 1..2: mod_base = OTHER; note = phosphorothioate internucleotide linkage
  modified_base 2..3: mod_base = OTHER; note = phosphorothioate internucleotide linkage
  modified_base 22..23: mod_base = OTHER; note = phosphorothioate internucleotide linkage
  modified_base 23..24: mod_base = OTHER; note = phosphorothioate internucleotide linkage
  modified_base 1: mod_base = OTHER; note = Thymine
tgagaatgagcctcgataactcttat

SEQ ID NO: 807 - RNA, 26 nt, synthetic construct
  source 1..26: mol_type = other RNA
  modified_base 1: mod_base = OTHER; note = 2'-deoxy nucleotide
  modified_base 3: mod_base = OTHER; note = 2'-OMe modified nucleotide
  modified_base 5: mod_base = OTHER; note = 2'-OMe modified nucleotide
  modified_base 7: mod_base = OTHER; note = 2'-OMe modified nucleotide
  modified_base 9..13: mod_base = OTHER; note = 2'-OMe modified nucleotide
  modified_base 15..17: mod_base = OTHER; note = 2'-OMe modified nucleotide
  modified_base 19: mod_base = OTHER; note = 2'-OMe modified nucleotide
  modified_base 21: mod_base = OTHER; note = 2'-OMe modified nucleotide
  modified_base 23..24: mod_base = OTHER; note = 2'-OMe modified nucleotide
  modified_base 26: mod_base = OTHER; note = 2'-OMe modified nucleotide
  modified_base 2: mod_base = OTHER; note = 2-deoxy-2-fluoro ribonucleotide
  modified_base 4: mod_base = OTHER; note = 2-deoxy-2-fluoro ribonucleotide
  modified_base 6: mod_base = OTHER; note = 2-deoxy-2-fluoro ribonucleotide
  modified_base 8: mod_base = OTHER; note = 2-deoxy-2-fluoro ribonucleotide
  modified_base 14: mod_base = OTHER; note = 2-deoxy-2-fluoro ribonucleotide
  modified_base 18: mod_base = OTHER; note = 2-deoxy-2-fluoro ribonucleotide
  modified_base 20: mod_base = OTHER; note = 2-deoxy-2-fluoro ribonucleotide
  modified_base 22: mod_base = OTHER; note = 2-deoxy-2-fluoro ribonucleotide
  modified_base 1..2: mod_base = OTHER; note = phosphorothioate internucleotide linkage
  modified_base 2..3: mod_base = OTHER; note = phosphorothioate internucleotide linkage
  modified_base 22..23: mod_base = OTHER; note = phosphorothioate internucleotide linkage
  modified_base 23..24: mod_base = OTHER; note = phosphorothioate internucleotide linkage
  modified_base 1: mod_base = OTHER; note = Thymine
tgagaatgagcctcgataactcttat

SEQ ID NO: 808 - RNA, 26 nt, synthetic construct
  source 1..26: mol_type = other RNA
  modified_base 1: mod_base = OTHER; note = 2'-deoxy nucleotide
  modified_base 3: mod_base = OTHER; note = 2'-OMe modified nucleotide
  modified_base 5: mod_base = OTHER; note = 2'-OMe modified nucleotide
  modified_base 7..13: mod_base = OTHER; note = 2'-OMe modified nucleotide
  modified_base 15..17: mod_base = OTHER; note = 2'-OMe modified nucleotide
  modified_base 19: mod_base = OTHER; note = 2'-OMe modified nucleotide
  modified_base 21: mod_base = OTHER; note = 2'-OMe modified nucleotide
  modified_base 23..24: mod_base = OTHER; note = 2'-OMe modified nucleotide
  modified_base 26: mod_base = OTHER; note = 2'-OMe modified nucleotide
  modified_base 2: mod_base = OTHER; note = 2-deoxy-2-fluoro ribonucleotide
  modified_base 4: mod_base = OTHER; note = 2-deoxy-2-fluoro ribonucleotide
  modified_base 6: mod_base = OTHER; note = 2-deoxy-2-fluoro ribonucleotide
  modified_base 14: mod_base = OTHER; note = 2-deoxy-2-fluoro ribonucleotide
  modified_base 18: mod_base = OTHER; note = 2-deoxy-2-fluoro ribonucleotide
  modified_base 20: mod_base = OTHER; note = 2-deoxy-2-fluoro ribonucleotide
  modified_base 22: mod_base = OTHER; note = 2-deoxy-2-fluoro ribonucleotide
  modified_base 1..2: mod_base = OTHER; note = phosphorothioate internucleotide linkage
  modified_base 2..3: mod_base = OTHER; note = phosphorothioate internucleotide linkage
  modified_base 22..23: mod_base = OTHER; note = phosphorothioate internucleotide linkage
  modified_base 23..24: mod_base = OTHER; note = phosphorothioate internucleotide linkage
  modified_base 1: mod_base = OTHER; note = Thymine
tgagaatgagcctcgataactcttat

SEQ ID NO: 809 - RNA, 26 nt, synthetic construct
  source 1..26: mol_type = other RNA
  modified_base 1: mod_base = OTHER; note = 2'-deoxy nucleotide
  modified_base 3: mod_base = OTHER; note = 2'-OMe modified nucleotide
  modified_base 5: mod_base = OTHER; note = 2'-OMe modified nucleotide
  modified_base 7..13: mod_base = OTHER; note = 2'-OMe modified nucleotide
  modified_base 15: mod_base = OTHER; note = 2'-OMe modified nucleotide
  modified_base 17..19: mod_base = OTHER; note = 2'-OMe modified nucleotide
  modified_base 21: mod_base = OTHER; note = 2'-OMe modified nucleotide
  modified_base 23..24: mod_base = OTHER; note = 2'-OMe modified nucleotide
  modified_base 26: mod_base = OTHER; note = 2'-OMe modified nucleotide
  modified_base 2: mod_base = OTHER; note = 2-deoxy-2-fluoro ribonucleotide
  modified_base 4: mod_base = OTHER; note = 2-deoxy-2-fluoro ribonucleotide
  modified_base 6: mod_base = OTHER; note = 2-deoxy-2-fluoro ribonucleotide
  modified_base 14: mod_base = OTHER; note = 2-deoxy-2-fluoro ribonucleotide
  modified_base 16: mod_base = OTHER; note = 2-deoxy-2-fluoro ribonucleotide
  modified_base 20: mod_base = OTHER; note = 2-deoxy-2-fluoro ribonucleotide
  modified_base 22: mod_base = OTHER; note = 2-deoxy-2-fluoro ribonucleotide
  modified_base 1..2: mod_base = OTHER; note = phosphorothioate internucleotide linkage
  modified_base 2..3: mod_base = OTHER; note = phosphorothioate internucleotide linkage
  modified_base 22..23: mod_base = OTHER; note = phosphorothioate internucleotide linkage
  modified_base 23..24: mod_base = OTHER; note = phosphorothioate internucleotide linkage
  modified_base 1: mod_base = OTHER; note = Thymine
tgagaatgagcctcgataactcttat

SEQ ID NO: 810 - RNA, 26 nt, synthetic construct
  source 1..26: mol_type = other RNA
  modified_base 1: mod_base = OTHER; note = 2'-deoxy nucleotide
  modified_base 3: mod_base = OTHER; note = 2'-OMe modified nucleotide
  modified_base 5: mod_base = OTHER; note = 2'-OMe modified nucleotide
  modified_base 7..9: mod_base = OTHER; note = 2'-OMe modified nucleotide
  modified_base 11..13: mod_base = OTHER; note = 2'-OMe modified nucleotide
  modified_base 15..19: mod_base = OTHER; note = 2'-OMe modified nucleotide
  modified_base 21: mod_base = OTHER; note = 2'-OMe modified nucleotide
  modified_base 23..24: mod_base = OTHER; note = 2'-OMe modified nucleotide
  modified_base 26: mod_base = OTHER; note = 2'-OMe modified nucleotide
  modified_base 2: mod_base = OTHER; note = 2-deoxy-2-fluoro ribonucleotide
  modified_base 4: mod_base = OTHER; note = 2-deoxy-2-fluoro ribonucleotide
  modified_base 6: mod_base = OTHER; note = 2-deoxy-2-fluoro ribonucleotide
  modified_base 10: mod_base = OTHER; note = 2-deoxy-2-fluoro ribonucleotide
  modified_base 14: mod_base = OTHER; note = 2-deoxy-2-fluoro ribonucleotide
  modified_base 20: mod_base = OTHER; note = 2-deoxy-2-fluoro ribonucleotide
  modified_base 22: mod_base = OTHER; note = 2-deoxy-2-fluoro ribonucleotide
  modified_base 1..2: mod_base = OTHER; note = phosphorothioate internucleotide linkage
  modified_base 2..3: mod_base = OTHER; note = phosphorothioate internucleotide linkage
  modified_base 22..23: mod_base = OTHER; note = phosphorothioate internucleotide linkage
  modified_base 23..24: mod_base = OTHER; note = phosphorothioate internucleotide linkage
  modified_base 1: mod_base = OTHER; note = Thymine
tgagaatgagcctcgataactcttat

SEQ ID NO: 811 - RNA, 26 nt, synthetic construct
  source 1..26: mol_type = other RNA
  modified_base 1: mod_base = OTHER; note = 2'-deoxy nucleotide
  modified_base 3: mod_base = OTHER; note = 2'-OMe modified nucleotide
  modified_base 5: mod_base = OTHER; note = 2'-OMe modified nucleotide
  modified_base 7: mod_base = OTHER; note = 2'-OMe modified nucleotide
  modified_base 9..13: mod_base = OTHER; note = 2'-OMe modified nucleotide
  modified_base 15..19: mod_base = OTHER; note = 2'-OMe modified nucleotide
  modified_base 21: mod_base = OTHER; note = 2'-OMe modified nucleotide
  modified_base 23..24: mod_base = OTHER; note = 2'-OMe modified nucleotide
  modified_base 26: mod_base = OTHER; note = 2'-OMe modified nucleotide
  modified_base 2: mod_base = OTHER; note = 2-deoxy-2-fluoro ribonucleotide
  modified_base 4: mod_base = OTHER; note = 2-deoxy-2-fluoro ribonucleotide
  modified_base 6: mod_base = OTHER; note = 2-deoxy-2-fluoro ribonucleotide
  modified_base 8: mod_base = OTHER; note = 2-deoxy-2-fluoro ribonucleotide
  modified_base 14: mod_base = OTHER; note = 2-deoxy-2-fluoro ribonucleotide
  modified_base 20: mod_base = OTHER; note = 2-deoxy-2-fluoro ribonucleotide
  modified_base 22: mod_base = OTHER; note = 2-deoxy-2-fluoro ribonucleotide
  modified_base 1..2: mod_base = OTHER; note = phosphorothioate internucleotide linkage
  modified_base 2..3: mod_base = OTHER; note = phosphorothioate internucleotide linkage
  modified_base 22..23: mod_base = OTHER; note = phosphorothioate internucleotide linkage
  modified_base 23..24: mod_base = OTHER; note = phosphorothioate internucleotide linkage
  modified_base 1: mod_base = OTHER; note = Thymine
tgagaatgagcctcgataactcttat

SEQ ID NO: 812 - RNA, 26 nt, synthetic construct
  source 1..26: mol_type = other RNA
  modified_base 1: mod_base = OTHER; note = 2'-deoxy nucleotide
  modified_base 2..9: mod_base = OTHER; note = 2'-OMe modified nucleotide
  modified_base 11..13: mod_base = OTHER; note = 2'-OMe modified nucleotide
  modified_base 15: mod_base = OTHER; note = 2'-OMe modified nucleotide
  modified_base 17: mod_base = OTHER; note = 2'-OMe modified nucleotide
  modified_base 19: mod_base = OTHER; note = 2'-OMe modified nucleotide
  modified_base 21: mod_base = OTHER; note = 2'-OMe modified nucleotide
  modified_base 23..24: mod_base = OTHER; note = 2'-OMe modified nucleotide
  modified_base 26: mod_base = OTHER; note = 2'-OMe modified nucleotide
  modified_base 10: mod_base = OTHER; note = 2-deoxy-2-fluoro ribonucleotide
  modified_base 14: mod_base = OTHER; note = 2-deoxy-2-fluoro ribonucleotide
  modified_base 16: mod_base = OTHER; note = 2-deoxy-2-fluoro ribonucleotide
  modified_base 18: mod_base = OTHER; note = 2-deoxy-2-fluoro ribonucleotide
  modified_base 20: mod_base = OTHER; note = 2-deoxy-2-fluoro ribonucleotide
  modified_base 22: mod_base = OTHER; note = 2-deoxy-2-fluoro ribonucleotide
  modified_base 1..2: mod_base = OTHER; note = phosphorothioate internucleotide linkage
  modified_base 2..3: mod_base = OTHER; note = phosphorothioate internucleotide linkage
  modified_base 22..23: mod_base = OTHER; note = phosphorothioate internucleotide linkage
  modified_base 23..24: mod_base = OTHER; note = phosphorothioate internucleotide linkage
  modified_base 1: mod_base = OTHER; note = Thymine
tgagaatgagcctcgataactcttat

SEQ ID NO: 813 - RNA, 26 nt, synthetic construct
  source 1..26: mol_type = other RNA
  modified_base 1: mod_base = OTHER; note = 2'-deoxy nucleotide
  modified_base 2..7: mod_base = OTHER; note = 2'-OMe modified nucleotide
  modified_base 9..13: mod_base = OTHER; note = 2'-OMe modified nucleotide
  modified_base 15: mod_base = OTHER; note = 2'-OMe modified nucleotide
  modified_base 17: mod_base = OTHER; note = 2'-OMe modified nucleotide
  modified_base 19: mod_base = OTHER; note = 2'-OMe modified nucleotide
  modified_base 21: mod_base = OTHER; note = 2'-OMe modified nucleotide
  modified_base 23..24: mod_base = OTHER; note = 2'-OMe modified nucleotide
  modified_base 26: mod_base = OTHER; note = 2'-OMe modified nucleotide
  modified_base 8: mod_base = OTHER; note = 2-deoxy-2-fluoro ribonucleotide
  modified_base 14: mod_base = OTHER; note = 2-deoxy-2-fluoro ribonucleotide
  modified_base 16: mod_base = OTHER; note = 2-deoxy-2-fluoro ribonucleotide
  modified_base 18: mod_base = OTHER; note = 2-deoxy-2-fluoro ribonucleotide
  modified_base 20: mod_base = OTHER; note = 2-deoxy-2-fluoro ribonucleotide
  modified_base 22: mod_base = OTHER; note = 2-deoxy-2-fluoro ribonucleotide
  modified_base 1..2: mod_base = OTHER; note = phosphorothioate internucleotide linkage
  modified_base 2..3: mod_base = OTHER; note = phosphorothioate internucleotide linkage
  modified_base 22..23: mod_base = OTHER; note = phosphorothioate internucleotide linkage
  modified_base 23..24: mod_base = OTHER; note = phosphorothioate internucleotide linkage
  modified_base 1: mod_base = OTHER; note = Thymine
tgagaatgagcctcgataactcttat

SEQ ID NO: 814 - RNA, 26 nt, synthetic construct
  source 1..26: mol_type = other RNA
  modified_base 1: mod_base = OTHER; note = 2'-deoxy nucleotide
  modified_base 2..5: mod_base = OTHER; note = 2'-OMe modified nucleotide
  modified_base 7..13: mod_base = OTHER; note = 2'-OMe modified nucleotide
  modified_base 15: mod_base = OTHER; note = 2'-OMe modified nucleotide
  modified_base 17: mod_base = OTHER; note = 2'-OMe modified nucleotide
  modified_base 19: mod_base = OTHER; note = 2'-OMe modified nucleotide
  modified_base 21: mod_base = OTHER; note = 2'-OMe modified nucleotide
  modified_base 23..24: mod_base = OTHER; note = 2'-OMe modified nucleotide
  modified_base 26: mod_base = OTHER; note = 2'-OMe modified nucleotide
  modified_base 6: mod_base = OTHER; note = 2-deoxy-2-fluoro ribonucleotide
  modified_base 14: mod_base = OTHER; note = 2-deoxy-2-fluoro ribonucleotide
  modified_base 16: mod_base = OTHER; note = 2-deoxy-2-fluoro ribonucleotide
  modified_base 18: mod_base = OTHER; note = 2-deoxy-2-fluoro ribonucleotide
  modified_base 20: mod_base = OTHER; note = 2-deoxy-2-fluoro ribonucleotide
  modified_base 22: mod_base = OTHER; note = 2-deoxy-2-fluoro ribonucleotide
  modified_base 1..2: mod_base = OTHER; note = phosphorothioate internucleotide linkage
  modified_base 2..3: mod_base = OTHER; note = phosphorothioate internucleotide linkage
  modified_base 22..23: mod_base = OTHER; note = phosphorothioate internucleotide linkage
  modified_base 23..24: mod_base = OTHER; note = phosphorothioate internucleotide linkage
  modified_base 1: mod_base = OTHER; note = Thymine
tgagaatgagcctcgataactcttat

SEQ ID NO: 815 - RNA, 26 nt, synthetic construct
  source 1..26: mol_type = other RNA
  modified_base 1: mod_base = OTHER; note = 2'-deoxy nucleotide
  modified_base 2: mod_base = OTHER; note = 2'-OMe modified nucleotide
  modified_base 3: mod_base = OTHER; note = 2'-OMe modified nucleotide
  modified_base 5..13: mod_base = OTHER; note = 2'-OMe modified nucleotide
  modified_base 15: mod_base = OTHER; note = 2'-OMe modified nucleotide
  modified_base 17: mod_base = OTHER; note = 2'-OMe modified nucleotide
  modified_base 19: mod_base = OTHER; note = 2'-OMe modified nucleotide
  modified_base 21: mod_base = OTHER; note = 2'-OMe modified nucleotide
  modified_base 23..24: mod_base = OTHER; note = 2'-OMe modified nucleotide
  modified_base 26: mod_base = OTHER; note = 2'-OMe modified nucleotide
  modified_base 4: mod_base = OTHER; note = 2-deoxy-2-fluoro ribonucleotide
  modified_base 14: mod_base = OTHER; note = 2-deoxy-2-fluoro ribonucleotide
  modified_base 16: mod_base = OTHER; note = 2-deoxy-2-fluoro ribonucleotide
  modified_base 18: mod_base = OTHER; note = 2-deoxy-2-fluoro ribonucleotide
  modified_base 20: mod_base = OTHER; note = 2-deoxy-2-fluoro ribonucleotide
  modified_base 22: mod_base = OTHER; note = 2-deoxy-2-fluoro ribonucleotide
  modified_base 1..2: mod_base = OTHER; note = phosphorothioate internucleotide linkage
  modified_base 2..3: mod_base = OTHER; note = phosphorothioate internucleotide linkage
  modified_base 22..23: mod_base = OTHER; note = phosphorothioate internucleotide linkage
  modified_base 23..24: mod_base = OTHER; note = phosphorothioate internucleotide linkage
  modified_base 1: mod_base = OTHER; note = Thymine
tgagaatgagcctcgataactcttat

SEQ ID NO: 816 - RNA, 26 nt, synthetic construct
  source 1..26: mol_type = other RNA
  modified_base 1: mod_base = OTHER; note = 2'-deoxy nucleotide
  modified_base 3..13: mod_base = OTHER; note = 2'-OMe modified nucleotide
  modified_base 15: mod_base = OTHER; note = 2'-OMe modified nucleotide
  modified_base 17: mod_base = OTHER; note = 2'-OMe modified nucleotide
  modified_base 19: mod_base = OTHER; note = 2'-OMe modified nucleotide
  modified_base 21: mod_base = OTHER; note = 2'-OMe modified nucleotide
  modified_base 23..24: mod_base = OTHER; note = 2'-OMe modified nucleotide
  modified_base 26: mod_base = OTHER; note = 2'-OMe modified nucleotide
  modified_base 2: mod_base = OTHER; note = 2-deoxy-2-fluoro ribonucleotide
  modified_base 14: mod_base = OTHER; note = 2-deoxy-2-fluoro ribonucleotide
  modified_base 16: mod_base = OTHER; note = 2-deoxy-2-fluoro ribonucleotide
  modified_base 18: mod_base = OTHER; note = 2-deoxy-2-fluoro ribonucleotide
  modified_base 20: mod_base = OTHER; note = 2-deoxy-2-fluoro ribonucleotide
  modified_base 22: mod_base = OTHER; note = 2-deoxy-2-fluoro ribonucleotide
  modified_base 1..2: mod_base = OTHER; note = phosphorothioate internucleotide linkage
  modified_base 2..3: mod_base = OTHER; note = phosphorothioate internucleotide linkage
  modified_base 22..23: mod_base = OTHER; note = phosphorothioate internucleotide linkage
  modified_base 23..24: mod_base = OTHER; note = phosphorothioate internucleotide linkage
  modified_base 1: mod_base = OTHER; note = Thymine
tgagaatgagcctcgataactcttat

SEQ ID NO: 817 - RNA, 26 nt, synthetic construct
  source 1..26: mol_type = other RNA
  modified_base 1..13: mod_base = OTHER; note = 2'-OMe modified nucleotide
  modified_base 15: mod_base = OTHER; note = 2'-OMe modified nucleotide
  modified_base 17: mod_base = OTHER; note = 2'-OMe modified nucleotide
  modified_base 19: mod_base = OTHER; note = 2'-OMe modified nucleotide
  modified_base 21: mod_base = OTHER; note = 2'-OMe modified nucleotide
  modified_base 23..24: mod_base = OTHER; note = 2'-OMe modified nucleotide
  modified_base 26: mod_base = OTHER; note = 2'-OMe modified nucleotide
  modified_base 14: mod_base = OTHER; note = 2-deoxy-2-fluoro ribonucleotide
  modified_base 16: mod_base = OTHER; note = 2-deoxy-2-fluoro ribonucleotide
  modified_base 18: mod_base = OTHER; note = 2-deoxy-2-fluoro ribonucleotide
  modified_base 20: mod_base = OTHER; note = 2-deoxy-2-fluoro ribonucleotide
  modified_base 22: mod_base = OTHER; note = 2-deoxy-2-fluoro ribonucleotide
  modified_base 1..2: mod_base = OTHER; note = phosphorothioate internucleotide linkage
  modified_base 2..3: mod_base = OTHER; note = phosphorothioate internucleotide linkage
  modified_base 22..23: mod_base = OTHER; note = phosphorothioate internucleotide linkage
  modified_base 23..24: mod_base = OTHER; note = phosphorothioate internucleotide linkage
tgagaatgagcctcgataactcttat

SEQ ID NO: 818 - RNA, 26 nt, synthetic construct
  source 1..26: mol_type = other RNA
  modified_base 1: mod_base = OTHER; note = 2'-OMe modified nucleotide
  modified_base 3: mod_base = OTHER; note = 2'-OMe modified nucleotide
  modified_base 5: mod_base = OTHER; note = 2'-OMe modified nucleotide
  modified_base 7: mod_base = OTHER; note = 2'-OMe modified nucleotide
  modified_base 8: mod_base = OTHER; note = 2'-OMe modified nucleotide
  modified_base 9: mod_base = OTHER; note = 2'-OMe modified nucleotide
  modified_base 10: mod_base = OTHER; note = 2'-OMe modified nucleotide
  modified_base 11: mod_base = OTHER; note = 2'-OMe modified nucleotide
  modified_base 12: mod_base = OTHER; note = 2'-OMe modified nucleotide
  modified_base 13: mod_base = OTHER; note = 2'-OMe modified nucleotide
  modified_base 15: mod_base = OTHER; note = 2'-OMe modified nucleotide
  modified_base 17: mod_base = OTHER; note = 2'-OMe modified nucleotide
  modified_base 19: mod_base = OTHER; note = 2'-OMe modified nucleotide
  modified_base 21: mod_base = OTHER; note = 2'-OMe modified nucleotide
  modified_base 23: mod_base = OTHER; note = 2'-OMe modified nucleotide
  modified_base 24: mod_base = OTHER; note = 2'-OMe modified nucleotide
  modified_base 26: mod_base = OTHER; note = 2'-OMe modified nucleotide
  modified_base 2: mod_base = OTHER; note = 2-deoxy-2-fluoro ribonucleotide
  modified_base 4: mod_base = OTHER; note = 2-deoxy-2-fluoro ribonucleotide
  modified_base 6: mod_base = OTHER; note = 2-deoxy-2-fluoro ribonucleotide
  modified_base 14: mod_base = OTHER; note = 2-deoxy-2-fluoro ribonucleotide
  modified_base 16: mod_base = OTHER; note = 2-deoxy-2-fluoro ribonucleotide
  modified_base 18: mod_base = OTHER; note = 2-deoxy-2-fluoro ribonucleotide
  modified_base 20: mod_base = OTHER; note = 2-deoxy-2-fluoro ribonucleotide
  modified_base 22: mod_base = OTHER; note = 2-deoxy-2-fluoro ribonucleotide
  modified_base 1..2: mod_base = OTHER; note = phosphorothioate internucleotide linkage
  modified_base 2..3: mod_base = OTHER; note = phosphorothioate internucleotide linkage
  modified_base 22..23: mod_base = OTHER; note = phosphorothioate internucleotide linkage
  modified_base 23..24: mod_base = OTHER; note = phosphorothioate internucleotide linkage
tgagaatgagcctcgataactcttat

SEQ ID NO: 819 - RNA, 26 nt, synthetic construct
  source 1..26: mol_type = other RNA
  modified_base 1: mod_base = OTHER; note = 2'-OMe modified nucleotide
  modified_base 3: mod_base = OTHER; note = 2'-OMe modified nucleotide
  modified_base 5: mod_base = OTHER; note = 2'-OMe modified nucleotide
  modified_base 7..9: mod_base = OTHER; note = 2'-OMe modified nucleotide
  modified_base 11..13: mod_base = OTHER; note = 2'-OMe modified nucleotide
  modified_base 15..17: mod_base = OTHER; note = 2'-OMe modified nucleotide
  modified_base 19: mod_base = OTHER; note = 2'-OMe modified nucleotide
  modified_base 21: mod_base = OTHER; note = 2'-OMe modified nucleotide
  modified_base 23..24: mod_base = OTHER; note = 2'-OMe modified nucleotide
  modified_base 26: mod_base = OTHER; note = 2'-OMe modified nucleotide
  modified_base 2: mod_base = OTHER; note = 2-deoxy-2-fluoro ribonucleotide
  modified_base 4: mod_base = OTHER; note = 2-deoxy-2-fluoro ribonucleotide
  modified_base 6: mod_base = OTHER; note = 2-deoxy-2-fluoro ribonucleotide
  modified_base 10: mod_base = OTHER; note = 2-deoxy-2-fluoro ribonucleotide
  modified_base 14: mod_base = OTHER; note = 2-deoxy-2-fluoro ribonucleotide
  modified_base 18: mod_base = OTHER; note = 2-deoxy-2-fluoro ribonucleotide
  modified_base 20: mod_base = OTHER; note = 2-deoxy-2-fluoro ribonucleotide
  modified_base 22: mod_base = OTHER; note = 2-deoxy-2-fluoro ribonucleotide
  modified_base 1..2: mod_base = OTHER; note = phosphorothioate internucleotide linkage
  modified_base 2..3: mod_base = OTHER; note = phosphorothioate internucleotide linkage
  modified_base 22..23: mod_base = OTHER; note = phosphorothioate internucleotide linkage
  modified_base 23..24: mod_base = OTHER; note = phosphorothioate internucleotide linkage
tgagaatgagcctcgataactcttat

SEQ ID NO: 820 - RNA, 26 nt, synthetic construct
  source 1..26: mol_type = other RNA
  modified_base 1: mod_base = OTHER; note = 2'-OMe modified nucleotide
  modified_base 3: mod_base = OTHER; note = 2'-OMe modified nucleotide
  modified_base 5: mod_base = OTHER; note = 2'-OMe modified nucleotide
  modified_base 7: mod_base = OTHER; note = 2'-OMe modified nucleotide
  modified_base 9..13: mod_base = OTHER; note = 2'-OMe modified nucleotide
  modified_base 15..17: mod_base = OTHER; note = 2'-OMe modified nucleotide
  modified_base 19: mod_base = OTHER; note = 2'-OMe modified nucleotide
  modified_base 21: mod_base = OTHER; note = 2'-OMe modified nucleotide
  modified_base 23..24: mod_base = OTHER; note = 2'-OMe modified nucleotide
  modified_base 26: mod_base = OTHER; note = 2'-OMe modified nucleotide
  modified_base 2: mod_base = OTHER; note = 2-deoxy-2-fluoro ribonucleotide
  modified_base 4: mod_base = OTHER; note = 2-deoxy-2-fluoro ribonucleotide
  modified_base 6: mod_base = OTHER; note = 2-deoxy-2-fluoro ribonucleotide
  modified_base 8: mod_base = OTHER; note = 2-deoxy-2-fluoro ribonucleotide
  modified_base 14: mod_base = OTHER; note = 2-deoxy-2-fluoro ribonucleotide
  modified_base 18: mod_base = OTHER; note = 2-deoxy-2-fluoro ribonucleotide
  modified_base 20: mod_base = OTHER; note = 2-deoxy-2-fluoro ribonucleotide
  modified_base 22: mod_base = OTHER; note = 2-deoxy-2-fluoro ribonucleotide
  modified_base 1..2: mod_base = OTHER; note = phosphorothioate internucleotide linkage
  modified_base 2..3: mod_base = OTHER; note = phosphorothioate internucleotide linkage
  modified_base 22..23: mod_base = OTHER; note = phosphorothioate internucleotide linkage
  modified_base 23..24: mod_base = OTHER; note = phosphorothioate internucleotide linkage
tgagaatgagcctcgataactcttat

SEQ ID NO: 821 - RNA, 26 nt, synthetic construct
  source 1..26: mol_type = other RNA
  modified_base 1: mod_base = OTHER; note = 2'-OMe modified nucleotide
  modified_base 3: mod_base = OTHER; note = 2'-OMe modified nucleotide
  modified_base 5: mod_base = OTHER; note = 2'-OMe modified nucleotide
  modified_base 7..13: mod_base = OTHER; note = 2'-OMe modified nucleotide
  modified_base 15..17: mod_base = OTHER; note = 2'-OMe modified nucleotide
  modified_base 19: mod_base = OTHER; note = 2'-OMe modified nucleotide
  modified_base 21: mod_base = OTHER; note = 2'-OMe modified nucleotide
  modified_base 23..24: mod_base = OTHER; note = 2'-OMe modified nucleotide
  modified_base 26: mod_base = OTHER; note = 2'-OMe modified nucleotide
  modified_base 2: mod_base = OTHER; note = 2-deoxy-2-fluoro ribonucleotide
  modified_base 4: mod_base = OTHER; note = 2-deoxy-2-fluoro ribonucleotide
  modified_base 6: mod_base = OTHER; note = 2-deoxy-2-fluoro ribonucleotide
  modified_base 14: mod_base = OTHER; note = 2-deoxy-2-fluoro ribonucleotide
  modified_base 18: mod_base = OTHER; note = 2-deoxy-2-fluoro ribonucleotide
  modified_base 20: mod_base = OTHER; note = 2-deoxy-2-fluoro ribonucleotide
  modified_base 22: mod_base = OTHER; note = 2-deoxy-2-fluoro ribonucleotide
  modified_base 1..2: mod_base = OTHER; note = phosphorothioate internucleotide linkage
  modified_base 2..3: mod_base = OTHER; note = phosphorothioate internucleotide linkage
  modified_base 22..23: mod_base = OTHER; note = phosphorothioate internucleotide linkage
  modified_base 23..24: mod_base = OTHER; note = phosphorothioate internucleotide linkage
tgagaatgagcctcgataactcttat

SEQ ID NO: 822 - RNA, 26 nt, synthetic construct
  source 1..26: mol_type = other RNA
  modified_base 1: mod_base = OTHER; note = 2'-OMe modified nucleotide
  modified_base 3: mod_base = OTHER; note = 2'-OMe modified nucleotide
  modified_base 5: mod_base = OTHER; note = 2'-OMe modified nucleotide
  modified_base 7..13: mod_base = OTHER; note = 2'-OMe modified nucleotide
  modified_base 15: mod_base = OTHER; note = 2'-OMe modified nucleotide
  modified_base 17..19: mod_base = OTHER; note = 2'-OMe modified nucleotide
  modified_base 21: mod_base = OTHER; note = 2'-OMe modified nucleotide
  modified_base 23..24: mod_base = OTHER; note = 2'-OMe modified nucleotide
  modified_base 26: mod_base = OTHER; note = 2'-OMe modified nucleotide
  modified_base 2: mod_base = OTHER; note = 2-deoxy-2-fluoro ribonucleotide
  modified_base 4: mod_base = OTHER; note = 2-deoxy-2-fluoro ribonucleotide
  modified_base 6: mod_base = OTHER; note = 2-deoxy-2-fluoro ribonucleotide
  modified_base 14: mod_base = OTHER; note = 2-deoxy-2-fluoro ribonucleotide
  modified_base 16: mod_base = OTHER; note = 2-deoxy-2-fluoro ribonucleotide
  modified_base 20: mod_base = OTHER; note = 2-deoxy-2-fluoro ribonucleotide
  modified_base 22: mod_base = OTHER; note = 2-deoxy-2-fluoro ribonucleotide
  modified_base 1..2: mod_base = OTHER; note = phosphorothioate internucleotide linkage
  modified_base 2..3: mod_base = OTHER; note = phosphorothioate internucleotide linkage
  modified_base 22..23: mod_base = OTHER; note = phosphorothioate internucleotide linkage
  modified_base 23..24: mod_base = OTHER; note = phosphorothioate internucleotide linkage
tgagaatgagcctcgataactcttat

SEQ ID NO: 823 - RNA, 26 nt, synthetic construct
  source 1..26: mol_type = other RNA
  modified_base 1: mod_base = OTHER; note = 2'-OMe modified nucleotide
  modified_base 3: mod_base = OTHER; note = 2'-OMe modified nucleotide
  modified_base 5: mod_base = OTHER; note = 2'-OMe modified nucleotide
  modified_base 7: mod_base = OTHER; note = 2'-OMe modified nucleotide
  modified_base 9..13: mod_base = OTHER; note = 2'-OMe modified nucleotide
  modified_base 15..19: mod_base = OTHER; note = 2'-OMe modified nucleotide
  modified_base 21: mod_base = OTHER; note = 2'-OMe modified nucleotide
  modified_base 23..24: mod_base = OTHER; note = 2'-OMe modified nucleotide
  modified_base 26: mod_base = OTHER; note = 2'-OMe modified nucleotide
  modified_base 2: mod_base = OTHER; note = 2-deoxy-2-fluoro ribonucleotide
  modified_base 4: mod_base = OTHER; note = 2-deoxy-2-fluoro ribonucleotide
  modified_base 6: mod_base = OTHER; note = 2-deoxy-2-fluoro ribonucleotide
  modified_base 8: mod_base = OTHER; note = 2-deoxy-2-fluoro ribonucleotide
  modified_base 14: mod_base = OTHER; note = 2-deoxy-2-fluoro ribonucleotide
  modified_base 20: mod_base = OTHER; note = 2-deoxy-2-fluoro ribonucleotide
  modified_base 22: mod_base = OTHER; note = 2-deoxy-2-fluoro ribonucleotide
  modified_base 1..2: mod_base = OTHER; note = phosphorothioate internucleotide linkage
  modified_base 2..3: mod_base = OTHER; note = phosphorothioate internucleotide linkage
  modified_base 22..23: mod_base = OTHER; note = phosphorothioate internucleotide linkage
  modified_base 23..24: mod_base = OTHER; note = phosphorothioate internucleotide linkage
tgagaatgagcctcgataactcttat

SEQ ID NO: 824 - RNA, 26 nt, synthetic construct
  source 1..26: mol_type = other RNA
  modified_base 1..3: mod_base = OTHER; note = 2'-OMe modified nucleotide
  modified_base 5: mod_base = OTHER; note = 2'-OMe modified nucleotide
  modified_base 7..9: mod_base = OTHER; note = 2'-OMe modified nucleotide
  modified_base 11..13: mod_base = OTHER; note = 2'-OMe modified nucleotide
  modified_base 15: mod_base = OTHER; note = 2'-OMe modified nucleotide
  modified_base 17: mod_base = OTHER; note = 2'-OMe modified nucleotide
  modified_base 19: mod_base = OTHER; note = 2'-OMe modified nucleotide
  modified_base 21: mod_base = OTHER; note = 2'-OMe modified nucleotide
  modified_base 23..24: mod_base = OTHER; note = 2'-OMe modified nucleotide
  modified_base 26: mod_base = OTHER; note = 2'-OMe modified nucleotide
  modified_base 4: mod_base = OTHER; note = 2-deoxy-2-fluoro ribonucleotide
  modified_base 6: mod_base = OTHER; note = 2-deoxy-2-fluoro ribonucleotide
  modified_base 10: mod_base = OTHER; note = 2-deoxy-2-fluoro ribonucleotide
  modified_base 14: mod_base = OTHER; note = 2-deoxy-2-fluoro ribonucleotide
  modified_base 16: mod_base = OTHER; note = 2-deoxy-2-fluoro ribonucleotide
  modified_base 18: mod_base = OTHER; note = 2-deoxy-2-fluoro ribonucleotide
  modified_base 20: mod_base = OTHER; note = 2-deoxy-2-fluoro ribonucleotide
  modified_base 22: mod_base = OTHER; note = 2-deoxy-2-fluoro ribonucleotide
  modified_base 1..2: mod_base = OTHER; note = phosphorothioate internucleotide linkage
  modified_base 2..3: mod_base = OTHER; note = phosphorothioate internucleotide linkage
  modified_base 22..23: mod_base = OTHER; note = phosphorothioate internucleotide linkage
  modified_base 23..24: mod_base = OTHER; note = phosphorothioate internucleotide linkage
tgacacctgattctgtttctgagtat

SEQ ID NO: 825 - RNA, 26 nt, synthetic construct
  source 1..26: mol_type = other RNA
  modified_base 1..3: mod_base = OTHER; note = 2'-OMe modified nucleotide
  modified_base 5: mod_base = OTHER; note = 2'-OMe modified nucleotide
  modified_base 7: mod_base = OTHER; note = 2'-OMe modified nucleotide
  modified_base 9..13: mod_base = OTHER; note = 2'-OMe modified nucleotide
  modified_base 15: mod_base = OTHER; note = 2'-OMe modified nucleotide
  modified_base 17: mod_base = OTHER; note = 2'-OMe modified nucleotide
  modified_base 19: mod_base = OTHER; note = 2'-OMe modified nucleotide
  modified_base 21: mod_base = OTHER; note = 2'-OMe modified nucleotide
  modified_base 23..24: mod_base = OTHER; note = 2'-OMe modified nucleotide
  modified_base 26: mod_base = OTHER; note = 2'-OMe modified nucleotide
  modified_base 4: mod_base = OTHER; note = 2-deoxy-2-fluoro ribonucleotide
  modified_base 6: mod_base = OTHER; note = 2-deoxy-2-fluoro ribonucleotide
  modified_base 8: mod_base = OTHER; note = 2-deoxy-2-fluoro ribonucleotide
  modified_base 14: mod_base = OTHER; note = 2-deoxy-2-fluoro ribonucleotide
  modified_base 16: mod_base = OTHER; note = 2-deoxy-2-fluoro ribonucleotide
  modified_base 18: mod_base = OTHER; note = 2-deoxy-2-fluoro ribonucleotide
  modified_base 20: mod_base = OTHER; note = 2-deoxy-2-fluoro ribonucleotide
  modified_base 22: mod_base = OTHER; note = 2-deoxy-2-fluoro ribonucleotide
  modified_base 1..2: mod_base = OTHER; note = phosphorothioate internucleotide linkage
  modified_base 2..3: mod_base = OTHER; note = phosphorothioate internucleotide linkage
  modified_base 22..23: mod_base = OTHER; note = phosphorothioate internucleotide linkage
  modified_base 23..24: mod_base = OTHER; note = phosphorothioate internucleotide linkage
tgacacctgattctgtttctgagtat

SEQ ID NO: 826 - RNA, 26 nt, synthetic construct
  source 1..26: mol_type = other RNA
  modified_base 1: mod_base = OTHER; note = 2'-deoxy nucleotide
  modified_base 2: mod_base = OTHER; note = 2'-OMe modified nucleotide
  modified_base 3: mod_base = OTHER; note = 2'-OMe modified nucleotide
  modified_base 5: mod_base = OTHER; note = 2'-OMe modified nucleotide
  modified_base 7: mod_base = OTHER; note = 2'-OMe modified nucleotide
  modified_base 8: mod_base = OTHER; note = 2'-OMe modified nucleotide
  modified_base 9: mod_base = OTHER; note = 2'-OMe modified nucleotide
  modified_base 10: mod_base = OTHER; note = 2'-OMe modified nucleotide
  modified_base 11: mod_base = OTHER; note = 2'-OMe modified nucleotide
  modified_base 12: mod_base = OTHER; note = 2'-OMe modified nucleotide
  modified_base 13: mod_base = OTHER; note = 2'-OMe modified nucleotide
  modified_base 15: mod_base = OTHER; note = 2'-OMe modified nucleotide
  modified_base 17: mod_base = OTHER; note = 2'-OMe modified nucleotide
  modified_base 19: mod_base = OTHER; note = 2'-OMe modified nucleotide
  modified_base 21: mod_base = OTHER; note = 2'-OMe modified nucleotide
  modified_base 23: mod_base = OTHER; note = 2'-OMe modified nucleotide
  modified_base 24: mod_base = OTHER; note = 2'-OMe modified nucleotide
  modified_base 26: mod_base = OTHER; note = 2'-OMe modified nucleotide
  modified_base 4: mod_base = OTHER; note = 2-deoxy-2-fluoro ribonucleotide
  modified_base 6: mod_base = OTHER; note = 2-deoxy-2-fluoro ribonucleotide
  modified_base 14: mod_base = OTHER; note = 2-deoxy-2-fluoro ribonucleotide
  modified_base 16: mod_base = OTHER; note = 2-deoxy-2-fluoro ribonucleotide
  modified_base 18: mod_base = OTHER; note = 2-deoxy-2-fluoro ribonucleotide
  modified_base 20: mod_base = OTHER; note = 2-deoxy-2-fluoro ribonucleotide
  modified_base 22: mod_base = OTHER; note = 2-deoxy-2-fluoro ribonucleotide
  modified_base 1..2: mod_base = OTHER; note = phosphorothioate internucleotide linkage
  modified_base 2..3: mod_base = OTHER; note = phosphorothioate internucleotide linkage
  modified_base 22..23: mod_base = OTHER; note = phosphorothioate internucleotide linkage
  modified_base 23..24: mod_base = OTHER; note = phosphorothioate internucleotide linkage
  modified_base 1: mod_base = OTHER; note = Thymine
tgacacctgattctgtttctgagtat

SEQ ID NO: 827 - RNA, 26 nt, synthetic construct
  source 1..26: mol_type = other RNA
  modified_base 1: mod_base = OTHER; note = 2'-deoxy nucleotide
  modified_base 3: mod_base = OTHER; note = 2'-OMe modified nucleotide
  modified_base 5: mod_base = OTHER; note = 2'-OMe modified nucleotide
  modified_base 7..9: mod_base = OTHER; note = 2'-OMe modified nucleotide
  modified_base 11..13: mod_base = OTHER; note = 2'-OMe modified nucleotide
  modified_base 15..17: mod_base = OTHER; note = 2'-OMe modified nucleotide
  modified_base 19: mod_base = OTHER; note = 2'-OMe modified nucleotide
  modified_base 21: mod_base = OTHER; note = 2'-OMe modified nucleotide
  modified_base 23..24: mod_base = OTHER; note = 2'-OMe modified nucleotide
  modified_base 26: mod_base = OTHER; note = 2'-OMe modified nucleotide
  modified_base 2: mod_base = OTHER; note = 2-deoxy-2-fluoro ribonucleotide
  modified_base 4: mod_base = OTHER; note = 2-deoxy-2-fluoro ribonucleotide
  modified_base 6: mod_base = OTHER; note = 2-deoxy-2-fluoro ribonucleotide
  modified_base 10: mod_base = OTHER; note = 2-deoxy-2-fluoro ribonucleotide
  modified_base 14: mod_base = OTHER; note = 2-deoxy-2-fluoro ribonucleotide
  modified_base 18: mod_base = OTHER; note = 2-deoxy-2-fluoro ribonucleotide
  modified_base 20: mod_base = OTHER; note = 2-deoxy-2-fluoro ribonucleotide
  modified_base 22: mod_base = OTHER; note = 2-deoxy-2-fluoro ribonucleotide
  modified_base 1..2: mod_base = OTHER; note = phosphorothioate internucleotide linkage
  modified_base 2..3: mod_base = OTHER; note = phosphorothioate internucleotide linkage
  modified_base 22..23: mod_base = OTHER; note = phosphorothioate internucleotide linkage
  modified_base 23..24: mod_base = OTHER; note = phosphorothioate internucleotide linkage
  modified_base 1: mod_base = OTHER; note = Thymine
tgacacctgattctgtttctgagtat

SEQ ID NO: 828 - RNA, 26 nt, synthetic construct
  source 1..26: mol_type = other RNA
  modified_base 1: mod_base = OTHER; note = 2'-deoxy nucleotide
  modified_base 3: mod_base = OTHER; note = 2'-OMe modified nucleotide
  modified_base 5: mod_base = OTHER; note = 2'-OMe modified nucleotide
  modified_base 7: mod_base = OTHER; note = 2'-OMe modified nucleotide
  modified_base 9..13: mod_base = OTHER; note = 2'-OMe modified nucleotide
  modified_base 15..17: mod_base = OTHER; note = 2'-OMe modified nucleotide
  modified_base 19: mod_base = OTHER; note = 2'-OMe modified nucleotide
  modified_base 21: mod_base = OTHER; note = 2'-OMe modified nucleotide
  modified_base 23..24: mod_base = OTHER; note = 2'-OMe modified nucleotide
  modified_base 26: mod_base = OTHER; note = 2'-OMe modified nucleotide
  modified_base 2: mod_base = OTHER; note = 2-deoxy-2-fluoro ribonucleotide
  modified_base 4: mod_base = OTHER; note = 2-deoxy-2-fluoro ribonucleotide
  modified_base 6: mod_base = OTHER; note = 2-deoxy-2-fluoro ribonucleotide
  modified_base 8: mod_base = OTHER; note = 2-deoxy-2-fluoro ribonucleotide
  modified_base 14: mod_base = OTHER; note = 2-deoxy-2-fluoro ribonucleotide
  modified_base 18: mod_base = OTHER; note = 2-deoxy-2-fluoro ribonucleotide
  modified_base 20: mod_base = OTHER; note = 2-deoxy-2-fluoro ribonucleotide
  modified_base 22: mod_base = OTHER; note = 2-deoxy-2-fluoro ribonucleotide
  modified_base 1..2: mod_base = OTHER; note = phosphorothioate internucleotide linkage
  modified_base 2..3: mod_base = OTHER; note = phosphorothioate internucleotide linkage
  modified_base 22..23: mod_base = OTHER; note = phosphorothioate internucleotide linkage
  modified_base 23..24: mod_base = OTHER; note = phosphorothioate internucleotide linkage
  modified_base 1: mod_base = OTHER; note = Thymine
tgacacctgattctgtttctgagtat

SEQ ID NO: 829 - RNA, 26 nt, synthetic construct
  source 1..26: mol_type = other RNA
  modified_base 1: mod_base = OTHER; note = 2'-deoxy nucleotide
  modified_base 3: mod_base = OTHER; note = 2'-OMe modified nucleotide
  modified_base 5: mod_base = OTHER; note = 2'-OMe modified nucleotide
  modified_base 7: mod_base = OTHER; note = 2'-OMe modified nucleotide
  modified_base 9..13: mod_base = OTHER; note = 2'-OMe modified nucleotide
  modified_base 15: mod_base = OTHER; note = 2'-OMe modified nucleotide
  modified_base 17..19: mod_base = OTHER; note = 2'-OMe modified nucleotide
  modified_base 21: mod_base = OTHER; note = 2'-OMe modified nucleotide
  modified_base 23..24: mod_base = OTHER; note = 2'-OMe modified nucleotide
  modified_base 26: mod_base = OTHER; note = 2'-OMe modified nucleotide
  modified_base 2: mod_base = OTHER; note = 2-deoxy-2-fluoro ribonucleotide
  modified_base 4: mod_base = OTHER; note = 2-deoxy-2-fluoro ribonucleotide
  modified_base 6: mod_base = OTHER; note = 2-deoxy-2-fluoro ribonucleotide
  modified_base 8: mod_base = OTHER; note = 2-deoxy-2-fluoro ribonucleotide
  modified_base 14: mod_base = OTHER; note = 2-deoxy-2-fluoro ribonucleotide
  modified_base 16: mod_base = OTHER; note = 2-deoxy-2-fluoro ribonucleotide
  modified_base 20: mod_base = OTHER; note = 2-deoxy-2-fluoro ribonucleotide
  modified_base 22: mod_base = OTHER; note = 2-deoxy-2-fluoro ribonucleotide
  modified_base 1..2: mod_base = OTHER; note = phosphorothioate internucleotide linkage
  modified_base 2..3: mod_base = OTHER; note = phosphorothioate internucleotide linkage
  modified_base 22..23: mod_base = OTHER; note = phosphorothioate internucleotide linkage
  modified_base 23..24: mod_base = OTHER; note = phosphorothioate internucleotide linkage
  modified_base 1: mod_base = OTHER; note = Thymine
tgacacctgattctgtttctgagtat

SEQ ID NO: 830 - RNA, 26 nt, synthetic construct
  source 1..26: mol_type = other RNA
  modified_base 1: mod_base = OTHER; note = 2'-deoxy nucleotide
  modified_base 3: mod_base = OTHER; note = 2'-OMe modified nucleotide
  modified_base 5: mod_base = OTHER; note = 2'-OMe modified nucleotide
  modified_base 7: mod_base = OTHER; note = 2'-OMe modified nucleotide
  modified_base 9: mod_base = OTHER; note = 2'-OMe modified nucleotide
  modified_base 11..13: mod_base = OTHER; note = 2'-OMe modified nucleotide
  modified_base 15..19: mod_base = OTHER; note = 2'-OMe modified nucleotide
  modified_base 21: mod_base = OTHER; note = 2'-OMe modified nucleotide
  modified_base 23..24: mod_base = OTHER; note = 2'-OMe modified nucleotide
  modified_base 26: mod_base = OTHER; note = 2'-OMe modified nucleotide
  modified_base 2: mod_base = OTHER; note = 2-deoxy-2-fluoro ribonucleotide
  modified_base 4: mod_base = OTHER; note = 2-deoxy-2-fluoro ribonucleotide
  modified_base 6: mod_base = OTHER; note = 2-deoxy-2-fluoro ribonucleotide
  modified_base 8: mod_base = OTHER; note = 2-deoxy-2-fluoro ribonucleotide
  modified_base 10: mod_base = OTHER; note = 2-deoxy-2-fluoro ribonucleotide
  modified_base 14: mod_base = OTHER; note = 2-deoxy-2-fluoro ribonucleotide
  modified_base 20: mod_base = OTHER; note = 2-deoxy-2-fluoro ribonucleotide
  modified_base 22: mod_base = OTHER; note = 2-deoxy-2-fluoro ribonucleotide
  modified_base 1..2: mod_base = OTHER; note = phosphorothioate internucleotide linkage
  modified_base 2..3: mod_base = OTHER; note = phosphorothioate internucleotide linkage
  modified_base 22..23: mod_base = OTHER; note = phosphorothioate internucleotide linkage
  modified_base 23..24: mod_base = OTHER; note = phosphorothioate internucleotide linkage
  modified_base 1: mod_base = OTHER; note = Thymine
tgacacctgattctgtttctgagtat

SEQ ID NO: 831 - RNA, 26 nt, synthetic construct
  source 1..26: mol_type = other RNA
  modified_base 1: mod_base = OTHER; note = 2'-deoxy nucleotide
  modified_base 3: mod_base = OTHER; note = 2'-OMe modified nucleotide
  modified_base 5: mod_base = OTHER; note = 2'-OMe modified nucleotide
  modified_base 7: mod_base = OTHER; note = 2'-OMe modified nucleotide
  modified_base 9: mod_base = OTHER; note = 2'-OMe modified nucleotide
  modified_base 11..13: mod_base = OTHER; note = 2'-OMe modified nucleotide
  modified_base 15..17: mod_base = OTHER; note = 2'-OMe modified nucleotide
  modified_base 19..21: mod_base = OTHER; note = 2'-OMe modified nucleotide
  modified_base 23..24: mod_base = OTHER; note = 2'-OMe modified nucleotide
  modified_base 26: mod_base = OTHER; note = 2'-OMe modified nucleotide
  modified_base 2: mod_base = OTHER; note = 2-deoxy-2-fluoro ribonucleotide
  modified_base 4: mod_base = OTHER; note = 2-deoxy-2-fluoro ribonucleotide
  modified_base 6: mod_base = OTHER; note = 2-deoxy-2-fluoro ribonucleotide
  modified_base 8: mod_base = OTHER; note = 2-deoxy-2-fluoro ribonucleotide
  modified_base 10: mod_base = OTHER; note = 2-deoxy-2-fluoro ribonucleotide
  modified_base 14: mod_base = OTHER; note = 2-deoxy-2-fluoro ribonucleotide
  modified_base 18: mod_base = OTHER; note = 2-deoxy-2-fluoro ribonucleotide
  modified_base 22: mod_base = OTHER; note = 2-deoxy-2-fluoro ribonucleotide
  modified_base 1..2: mod_base = OTHER; note = phosphorothioate internucleotide linkage
  modified_base 2..3: mod_base = OTHER; note = phosphorothioate internucleotide linkage
  modified_base 22..23: mod_base = OTHER; note = phosphorothioate internucleotide linkage
  modified_base 23..24: mod_base = OTHER; note = phosphorothioate internucleotide linkage
  modified_base 1: mod_base = OTHER; note = Thymine
tgacacctgattctgtttctgagtat

SEQ ID NO: 832 - RNA, 26 nt, synthetic construct
  source 1..26: mol_type = other RNA
  modified_base 1: mod_base = OTHER; note = 2'-deoxy nucleotide
  modified_base 3: mod_base = OTHER; note = 2'-OMe modified nucleotide
  modified_base 5: mod_base = OTHER; note = 2'-OMe modified nucleotide
  modified_base 7: mod_base = OTHER; note = 2'-OMe modified nucleotide
  modified_base 9: mod_base = OTHER; note = 2'-OMe modified nucleotide
  modified_base 11..13: mod_base = OTHER; note = 2'-OMe modified nucleotide
  modified_base 15: mod_base = OTHER; note = 2'-OMe modified nucleotide
  modified_base 17..21: mod_base = OTHER; note = 2'-OMe modified nucleotide
  modified_base 23..24: mod_base = OTHER; note = 2'-OMe modified nucleotide
  modified_base 26: mod_base = OTHER; note = 2'-OMe modified nucleotide
  modified_base 2: mod_base = OTHER; note = 2-deoxy-2-fluoro ribonucleotide
  modified_base 4: mod_base = OTHER; note = 2-deoxy-2-fluoro ribonucleotide
  modified_base 6: mod_base = OTHER; note = 2-deoxy-2-fluoro ribonucleotide
  modified_base 8: mod_base = OTHER; note = 2-deoxy-2-fluoro ribonucleotide
  modified_base 10: mod_base = OTHER; note = 2-deoxy-2-fluoro ribonucleotide
  modified_base 14: mod_base = OTHER; note = 2-deoxy-2-fluoro ribonucleotide
  modified_base 16: mod_base = OTHER; note = 2-deoxy-2-fluoro ribonucleotide
  modified_base 22: mod_base = OTHER; note = 2-deoxy-2-fluoro ribonucleotide
  modified_base 1..2: mod_base = OTHER; note = phosphorothioate internucleotide linkage
  modified_base 2..3: mod_base = OTHER; note = phosphorothioate internucleotide linkage
  modified_base 22..23: mod_base = OTHER; note = phosphorothioate internucleotide linkage
  modified_base 23..24: mod_base = OTHER; note = phosphorothioate internucleotide linkage
  modified_base 1: mod_base = OTHER; note = Thymine
tgacacctgattctgtttctgagtat

SEQ ID NO: 833 - RNA, 26 nt, synthetic construct
  source 1..26: mol_type = other RNA
  modified_base 1: mod_base = OTHER; note = 2'-deoxy nucleotide
  modified_base 3: mod_base = OTHER; note = 2'-OMe modified nucleotide
  modified_base 5: mod_base = OTHER; note = 2'-OMe modified nucleotide
  modified_base 7: mod_base = OTHER; note = 2'-OMe modified nucleotide
  modified_base 9: mod_base = OTHER; note = 2'-OMe modified nucleotide
  modified_base 11..13: mod_base = OTHER; note = 2'-OMe modified nucleotide
  modified_base 15..21: mod_base = OTHER; note = 2'-OMe modified nucleotide
  modified_base 23..24: mod_base = OTHER; note = 2'-OMe modified nucleotide
  modified_base 26: mod_base = OTHER; note = 2'-OMe modified nucleotide
  modified_base 2: mod_base = OTHER; note = 2-deoxy-2-fluoro ribonucleotide
  modified_base 4: mod_base = OTHER; note = 2-deoxy-2-fluoro ribonucleotide
  modified_base 6: mod_base = OTHER; note = 2-deoxy-2-fluoro ribonucleotide
  modified_base 8: mod_base = OTHER; note = 2-deoxy-2-fluoro ribonucleotide
  modified_base 10: mod_base = OTHER; note = 2-deoxy-2-fluoro ribonucleotide
  modified_base 14: mod_base = OTHER; note = 2-deoxy-2-fluoro ribonucleotide
  modified_base 22: mod_base = OTHER; note = 2-deoxy-2-fluoro ribonucleotide
  modified_base 1..2: mod_base = OTHER; note = phosphorothioate internucleotide linkage
  modified_base 2..3: mod_base = OTHER; note = phosphorothioate internucleotide linkage
  modified_base 22..23: mod_base = OTHER; note = phosphorothioate internucleotide linkage
  modified_base 23..24: mod_base = OTHER; note = phosphorothioate internucleotide linkage
  modified_base 1: mod_base = OTHER; note = Thymine
tgacacctgattctgtttctgagtat

SEQ ID NO: 834 - RNA, 26 nt, synthetic construct
  source 1..26: mol_type = other RNA
  modified_base 1: mod_base = OTHER; note = 2'-deoxy nucleotide
  modified_base 3: mod_base = OTHER; note = 2'-OMe modified nucleotide
  modified_base 5: mod_base = OTHER; note = 2'-OMe modified nucleotide
  modified_base 7: mod_base = OTHER; note = 2'-OMe modified nucleotide
  modified_base 9: mod_base = OTHER; note = 2'-OMe modified nucleotide
  modified_base 11..13: mod_base = OTHER; note = 2'-OMe modified nucleotide
  modified_base 15..19: mod_base = OTHER; note = 2'-OMe modified nucleotide
  modified_base 21..24: mod_base = OTHER; note = 2'-OMe modified nucleotide
  modified_base 26: mod_base = OTHER; note = 2'-OMe modified nucleotide
  modified_base 2: mod_base = OTHER; note = 2-deoxy-2-fluoro ribonucleotide
  modified_base 4: mod_base = OTHER; note = 2-deoxy-2-fluoro ribonucleotide
  modified_base 6: mod_base = OTHER; note = 2-deoxy-2-fluoro ribonucleotide
  modified_base 8: mod_base = OTHER; note = 2-deoxy-2-fluoro ribonucleotide
  modified_base 10: mod_base = OTHER; note = 2-deoxy-2-fluoro ribonucleotide
  modified_base 14: mod_base = OTHER; note = 2-deoxy-2-fluoro ribonucleotide
  modified_base 20: mod_base = OTHER; note = 2-deoxy-2-fluoro ribonucleotide
  modified_base 1..2: mod_base = OTHER; note = phosphorothioate internucleotide linkage
  modified_base 2..3: mod_base = OTHER; note = phosphorothioate internucleotide linkage
  modified_base 22..23: mod_base = OTHER; note = phosphorothioate internucleotide linkage
  modified_base 23..24: mod_base = OTHER; note = phosphorothioate internucleotide linkage
  modified_base 1: mod_base = OTHER; note = Thymine
tgacacctgattctgtttctgagtat

SEQ ID NO: 835 - RNA, 26 nt, synthetic construct
  source 1..26: mol_type = other RNA
  modified_base 1: mod_base = OTHER; note = 2'-deoxy nucleotide
  modified_base 3: mod_base = OTHER; note = 2'-OMe modified nucleotide
  modified_base 5: mod_base = OTHER; note = 2'-OMe modified nucleotide
  modified_base 7: mod_base = OTHER; note = 2'-OMe modified nucleotide
  modified_base 9: mod_base = OTHER; note = 2'-OMe modified nucleotide
  modified_base 11..13: mod_base = OTHER; note = 2'-OMe modified nucleotide
  modified_base 15..17: mod_base = OTHER; note = 2'-OMe modified nucleotide
  modified_base 19..24: mod_base = OTHER; note = 2'-OMe modified nucleotide
  modified_base 26: mod_base = OTHER; note = 2'-OMe modified nucleotide
  modified_base 2: mod_base = OTHER; note = 2-deoxy-2-fluoro ribonucleotide
  modified_base 4: mod_base = OTHER; note = 2-deoxy-2-fluoro ribonucleotide
  modified_base 6: mod_base = OTHER; note = 2-deoxy-2-fluoro ribonucleotide
  modified_base 8: mod_base = OTHER; note = 2-deoxy-2-fluoro ribonucleotide
  modified_base 10: mod_base = OTHER; note = 2-deoxy-2-fluoro ribonucleotide
  modified_base 14: mod_base = OTHER; note = 2-deoxy-2-fluoro ribonucleotide
  modified_base 18: mod_base = OTHER; note = 2-deoxy-2-fluoro ribonucleotide
  modified_base 1..2: mod_base = OTHER; note = phosphorothioate internucleotide linkage
  modified_base 2..3: mod_base = OTHER; note = phosphorothioate internucleotide linkage
  modified_base 22..23: mod_base = OTHER; note = phosphorothioate internucleotide linkage
  modified_base 23..24: mod_base = OTHER; note = phosphorothioate internucleotide linkage
  modified_base 1: mod_base = OTHER; note = Thymine
tgacacctgattctgtttctgagtat

SEQ ID NO: 836 - RNA, 26 nt, synthetic construct
  source 1..26: mol_type = other RNA
  modified_base 1: mod_base = OTHER; note = 2'-deoxy nucleotide
  modified_base 2: mod_base = OTHER; note = 2'-OMe modified nucleotide
  modified_base 3: mod_base = OTHER; note = 2'-OMe modified nucleotide
  modified_base 5: mod_base = OTHER; note = 2'-OMe modified nucleotide
  modified_base 7..9: mod_base = OTHER; note = 2'-OMe modified nucleotide
  modified_base 11..13: mod_base = OTHER; note = 2'-OMe modified nucleotide
  modified_base 15: mod_base = OTHER; note = 2'-OMe modified nucleotide
  modified_base 17: mod_base = OTHER; note = 2'-OMe modified nucleotide
  modified_base 19: mod_base = OTHER; note = 2'-OMe modified nucleotide
  modified_base 21: mod_base = OTHER; note = 2'-OMe modified nucleotide
  modified_base 23..24: mod_base = OTHER; note = 2'-OMe modified nucleotide
  modified_base 26: mod_base = OTHER; note = 2'-OMe modified nucleotide
  modified_base 4: mod_base = OTHER; note = 2-deoxy-2-fluoro ribonucleotide
  modified_base 6: mod_base = OTHER; note = 2-deoxy-2-fluoro ribonucleotide
  modified_base 10: mod_base = OTHER; note = 2-deoxy-2-fluoro ribonucleotide
  modified_base 14: mod_base = OTHER; note = 2-deoxy-2-fluoro ribonucleotide
  modified_base 16: mod_base = OTHER; note = 2-deoxy-2-fluoro ribonucleotide
  modified_base 18: mod_base = OTHER; note = 2-deoxy-2-fluoro ribonucleotide
  modified_base 20: mod_base = OTHER; note = 2-deoxy-2-fluoro ribonucleotide
  modified_base 22: mod_base = OTHER; note = 2-deoxy-2-fluoro ribonucleotide
  modified_base 1..2: mod_base = OTHER; note = phosphorothioate internucleotide linkage
  modified_base 2..3: mod_base = OTHER; note = phosphorothioate internucleotide linkage
  modified_base 22..23: mod_base = OTHER; note = phosphorothioate internucleotide linkage
  modified_base 23..24: mod_base = OTHER; note = phosphorothioate internucleotide linkage
  modified_base 1: mod_base = OTHER; note = Thymine
tgacacctgattctgtttctgagtat

SEQ ID NO: 837 - RNA, 26 nt, synthetic construct
  source 1..26: mol_type = other RNA
  modified_base 1: mod_base = OTHER; note = 2'-deoxy nucleotide
  modified_base 2: mod_base = OTHER; note = 2'-OMe modified nucleotide
  modified_base 3: mod_base = OTHER; note = 2'-OMe modified nucleotide
  modified_base 5: mod_base = OTHER; note = 2'-OMe modified nucleotide
  modified_base 7: mod_base = OTHER; note = 2'-OMe modified nucleotide
  modified_base 9..13: mod_base = OTHER; note = 2'-OMe modified nucleotide
  modified_base 15: mod_base = OTHER; note = 2'-OMe modified nucleotide
  modified_base 17: mod_base = OTHER; note = 2'-OMe modified nucleotide
  modified_base 19: mod_base = OTHER; note = 2'-OMe modified nucleotide
  modified_base 21: mod_base = OTHER; note = 2'-OMe modified nucleotide
  modified_base 23..24: mod_base = OTHER; note = 2'-OMe modified nucleotide
  modified_base 26: mod_base = OTHER; note = 2'-OMe modified nucleotide
  modified_base 4: mod_base = OTHER; note = 2-deoxy-2-fluoro ribonucleotide
  modified_base 6: mod_base = OTHER; note = 2-deoxy-2-fluoro ribonucleotide
  modified_base 8: mod_base = OTHER; note = 2-deoxy-2-fluoro ribonucleotide
  modified_base 14: mod_base = OTHER; note = 2-deoxy-2-fluoro ribonucleotide
  modified_base 16: mod_base = OTHER; note = 2-deoxy-2-fluoro ribonucleotide
  modified_base 18: mod_base = OTHER; note = 2-deoxy-2-fluoro ribonucleotide
  modified_base 20: mod_base = OTHER; note = 2-deoxy-2-fluoro ribonucleotide
  modified_base 22: mod_base = OTHER; note = 2-deoxy-2-fluoro ribonucleotide
  modified_base 1..2: mod_base = OTHER; note = phosphorothioate internucleotide linkage
  modified_base 2..3: mod_base = OTHER; note = phosphorothioate internucleotide linkage
  modified_base 22..23: mod_base = OTHER; note = phosphorothioate internucleotide linkage
  modified_base 23..24: mod_base = OTHER; note = phosphorothioate internucleotide linkage
  modified_base 1: mod_base = OTHER; note = Thymine
tgacacctgattctgtttctgagtat

SEQ ID NO: 838 - RNA, 26 nt, synthetic construct
  source 1..26: mol_type = other RNA
  modified_base 1: mod_base = OTHER; note = 2'-OMe modified nucleotide
  modified_base 2: mod_base = OTHER; note = 2'-OMe modified nucleotide
  modified_base 3: mod_base = OTHER; note = 2'-OMe modified nucleotide
  modified_base 5: mod_base = OTHER; note = 2'-OMe modified nucleotide
  modified_base 7: mod_base = OTHER; note = 2'-OMe modified nucleotide
  modified_base 8: mod_base = OTHER; note = 2'-OMe modified nucleotide
  modified_base 9: mod_base = OTHER; note = 2'-OMe modified nucleotide
  modified_base 10: mod_base = OTHER; note = 2'-OMe modified nucleotide
  modified_base 11: mod_base = OTHER; note = 2'-OMe modified nucleotide
  modified_base 12: mod_base = OTHER; note = 2'-OMe modified nucleotide
  modified_base 13: mod_base = OTHER; note = 2'-OMe modified nucleotide
  modified_base 15: mod_base = OTHER; note = 2'-OMe modified nucleotide
  modified_base 17: mod_base = OTHER; note = 2'-OMe modified nucleotide
  modified_base 19: mod_base = OTHER; note = 2'-OMe modified nucleotide
  modified_base 21: mod_base = OTHER; note = 2'-OMe modified nucleotide
  modified_base 23: mod_base = OTHER; note = 2'-OMe modified nucleotide
  modified_base 24: mod_base = OTHER; note = 2'-OMe modified nucleotide
  modified_base 26: mod_base = OTHER; note = 2'-OMe modified nucleotide
  modified_base 4: mod_base = OTHER; note = 2-deoxy-2-fluoro ribonucleotide
  modified_base 6: mod_base = OTHER; note = 2-deoxy-2-fluoro ribonucleotide
  modified_base 14: mod_base = OTHER; note = 2-deoxy-2-fluoro ribonucleotide
  modified_base 16: mod_base = OTHER; note = 2-deoxy-2-fluoro ribonucleotide
  modified_base 18: mod_base = OTHER; note = 2-deoxy-2-fluoro ribonucleotide
  modified_base 20: mod_base = OTHER; note = 2-deoxy-2-fluoro ribonucleotide
  modified_base 22: mod_base = OTHER; note = 2-deoxy-2-fluoro ribonucleotide
  modified_base 1..2: mod_base = OTHER; note = phosphorothioate internucleotide linkage
  modified_base 2..3: mod_base = OTHER; note = phosphorothioate internucleotide linkage
  modified_base 22..23: mod_base = OTHER; note = phosphorothioate internucleotide linkage
  modified_base 23..24: mod_base = OTHER; note = phosphorothioate internucleotide linkage
tgacacctgattctgtttctgagtat

SEQ ID NO: 839 - RNA, 26 nt, synthetic construct
  source 1..26: mol_type = other RNA
  modified_base 1: mod_base = OTHER; note = 2'-OMe modified nucleotide
  modified_base 3: mod_base = OTHER; note = 2'-OMe modified nucleotide
  modified_base 5: mod_base = OTHER; note = 2'-OMe modified nucleotide
  modified_base 7..9: mod_base = OTHER; note = 2'-OMe modified nucleotide
  modified_base 11..13: mod_base = OTHER; note = 2'-OMe modified nucleotide
  modified_base 15..17: mod_base = OTHER; note = 2'-OMe modified nucleotide
  modified_base 19: mod_base = OTHER; note = 2'-OMe modified nucleotide
  modified_base 21: mod_base = OTHER; note = 2'-OMe modified nucleotide
  modified_base 23..24: mod_base = OTHER; note = 2'-OMe modified nucleotide
  modified_base 26: mod_base = OTHER; note = 2'-OMe modified nucleotide
  modified_base 2: mod_base = OTHER; note = 2-deoxy-2-fluoro ribonucleotide
  modified_base 4: mod_base = OTHER; note = 2-deoxy-2-fluoro ribonucleotide
  modified_base 6: mod_base = OTHER; note = 2-deoxy-2-fluoro ribonucleotide
  modified_base 10: mod_base = OTHER; note = 2-deoxy-2-fluoro ribonucleotide
  modified_base 14: mod_base = OTHER; note = 2-deoxy-2-fluoro ribonucleotide
  modified_base 18: mod_base = OTHER; note = 2-deoxy-2-fluoro ribonucleotide
  modified_base 20: mod_base = OTHER; note = 2-deoxy-2-fluoro ribonucleotide
  modified_base 22: mod_base = OTHER; note = 2-deoxy-2-fluoro ribonucleotide
  modified_base 1..2: mod_base = OTHER; note = phosphorothioate internucleotide linkage
  modified_base 2..3: mod_base = OTHER; note = phosphorothioate internucleotide linkage
  modified_base 22..23: mod_base = OTHER; note = phosphorothioate internucleotide linkage
  modified_base 23..24: mod_base = OTHER; note = phosphorothioate internucleotide linkage
tgacacctgattctgtttctgagtat

SEQ ID NO: 840 - RNA, 26 nt, synthetic construct
  source 1..26: mol_type = other RNA
  modified_base 1: mod_base = OTHER; note = 2'-OMe modified nucleotide
  modified_base 3: mod_base = OTHER; note = 2'-OMe modified nucleotide
  modified_base 5: mod_base = OTHER; note = 2'-OMe modified nucleotide
  modified_base 7: mod_base = OTHER; note = 2'-OMe modified nucleotide
  modified_base 9..13: mod_base = OTHER; note = 2'-OMe modified nucleotide
  modified_base 15..17: mod_base = OTHER; note = 2'-OMe modified nucleotide
  modified_base 19: mod_base = OTHER; note = 2'-OMe modified nucleotide
  modified_base 21: mod_base = OTHER; note = 2'-OMe modified nucleotide
  modified_base 23..24: mod_base = OTHER; note = 2'-OMe modified nucleotide
  modified_base 26: mod_base = OTHER; note = 2'-OMe modified nucleotide
  modified_base 2: mod_base = OTHER; note = 2-deoxy-2-fluoro ribonucleotide
  modified_base 4: mod_base = OTHER; note = 2-deoxy-2-fluoro ribonucleotide
  modified_base 6: mod_base = OTHER; note = 2-deoxy-2-fluoro ribonucleotide
  modified_base 8: mod_base = OTHER; note = 2-deoxy-2-fluoro ribonucleotide
  modified_base 14: mod_base = OTHER; note = 2-deoxy-2-fluoro ribonucleotide
  modified_base 18: mod_base = OTHER; note = 2-deoxy-2-fluoro ribonucleotide
  modified_base 20: mod_base = OTHER; note = 2-deoxy-2-fluoro ribonucleotide
  modified_base 22: mod_base = OTHER; note = 2-deoxy-2-fluoro ribonucleotide
  modified_base 1..2: mod_base = OTHER; note = phosphorothioate internucleotide linkage
  modified_base 2..3: mod_base = OTHER; note = phosphorothioate internucleotide linkage
  modified_base 22..23: mod_base = OTHER; note = phosphorothioate internucleotide linkage
  modified_base 23..24: mod_base = OTHER; note = phosphorothioate internucleotide linkage
tgacacctgattctgtttctgagtat

SEQ ID NO: 841 - RNA, 26 nt, synthetic construct
  source 1..26: mol_type = other RNA
  modified_base 1: mod_base = OTHER; note = 2'-OMe modified nucleotide
  modified_base 3: mod_base = OTHER; note = 2'-OMe modified nucleotide
  modified_base 5: mod_base = OTHER; note = 2'-OMe modified nucleotide
  modified_base 7: mod_base = OTHER; note = 2'-OMe modified nucleotide
  modified_base 9..13: mod_base = OTHER; note = 2'-OMe modified nucleotide
  modified_base 15: mod_base = OTHER; note = 2'-OMe modified nucleotide
  modified_base 17..19: mod_base = OTHER; note = 2'-OMe modified nucleotide
  modified_base 21: mod_base = OTHER; note = 2'-OMe modified nucleotide
  modified_base 23..24: mod_base = OTHER; note = 2'-OMe modified nucleotide
  modified_base 26: mod_base = OTHER; note = 2'-OMe modified nucleotide
  modified_base 2: mod_base = OTHER; note = 2-deoxy-2-fluoro ribonucleotide
  modified_base 4: mod_base = OTHER; note = 2-deoxy-2-fluoro ribonucleotide
  modified_base 6: mod_base = OTHER; note = 2-deoxy-2-fluoro ribonucleotide
  modified_base 8: mod_base = OTHER; note = 2-deoxy-2-fluoro ribonucleotide
  modified_base 14: mod_base = OTHER; note = 2-deoxy-2-fluoro ribonucleotide
  modified_base 16: mod_base = OTHER; note = 2-deoxy-2-fluoro ribonucleotide
  modified_base 20: mod_base = OTHER; note = 2-deoxy-2-fluoro ribonucleotide
  modified_base 22: mod_base = OTHER; note = 2-deoxy-2-fluoro ribonucleotide
  modified_base 1..2: mod_base = OTHER; note = phosphorothioate internucleotide linkage
  modified_base 2..3: mod_base = OTHER; note = phosphorothioate internucleotide linkage
  modified_base 22..23: mod_base = OTHER; note = phosphorothioate internucleotide linkage
  modified_base 23..24: mod_base = OTHER; note = phosphorothioate internucleotide linkage
tgacacctgattctgtttctgagtat

SEQ ID NO: 842 - RNA, 26 nt, synthetic construct
  source 1..26: mol_type = other RNA
  modified_base 1: mod_base = OTHER; note = 2'-OMe modified nucleotide
  modified_base 3: mod_base = OTHER; note = 2'-OMe modified nucleotide
  modified_base 5: mod_base = OTHER; note = 2'-OMe modified nucleotide
  modified_base 7: mod_base = OTHER; note = 2'-OMe modified nucleotide
  modified_base 9: mod_base = OTHER; note = 2'-OMe modified nucleotide
  modified_base 11..13: mod_base = OTHER; note = 2'-OMe modified nucleotide
  modified_base 15..19: mod_base = OTHER; note = 2'-OMe modified nucleotide
  modified_base 21: mod_base = OTHER; note = 2'-OMe modified nucleotide
  modified_base 23..24: mod_base = OTHER; note = 2'-OMe modified nucleotide
  modified_base 26: mod_base = OTHER; note = 2'-OMe modified nucleotide
  modified_base 2: mod_base = OTHER; note = 2-deoxy-2-fluoro ribonucleotide
  modified_base 4: mod_base = OTHER; note = 2-deoxy-2-fluoro ribonucleotide
  modified_base 6: mod_base = OTHER; note = 2-deoxy-2-fluoro ribonucleotide
  modified_base 8: mod_base = OTHER; note = 2-deoxy-2-fluoro ribonucleotide
  modified_base 10: mod_base = OTHER; note = 2-deoxy-2-fluoro ribonucleotide
  modified_base 14: mod_base = OTHER; note = 2-deoxy-2-fluoro ribonucleotide
  modified_base 20: mod_base = OTHER; note = 2-deoxy-2-fluoro ribonucleotide
  modified_base 22: mod_base = OTHER; note = 2-deoxy-2-fluoro ribonucleotide
  modified_base 1..2: mod_base = OTHER; note = phosphorothioate internucleotide linkage
  modified_base 2..3: mod_base = OTHER; note = phosphorothioate internucleotide linkage
  modified_base 22..23: mod_base = OTHER; note = phosphorothioate internucleotide linkage
  modified_base 23..24: mod_base = OTHER; note = phosphorothioate internucleotide linkage
tgacacctgattctgtttctgagtat

SEQ ID NO: 843 - RNA, 26 nt, synthetic construct
  source 1..26: mol_type = other RNA
  modified_base 1: mod_base = OTHER; note = 2'-OMe modified nucleotide
  modified_base 3: mod_base = OTHER; note = 2'-OMe modified nucleotide
  modified_base 5: mod_base = OTHER; note = 2'-OMe modified nucleotide
  modified_base 7: mod_base = OTHER; note = 2'-OMe modified nucleotide
  modified_base 9: mod_base = OTHER; note = 2'-OMe modified nucleotide
  modified_base 11..13: mod_base = OTHER; note = 2'-OMe modified nucleotide
  modified_base 15..17: mod_base = OTHER; note = 2'-OMe modified nucleotide
  modified_base 19..21: mod_base = OTHER; note = 2'-OMe modified nucleotide
  modified_base 23..24: mod_base = OTHER; note = 2'-OMe modified nucleotide
  modified_base 26: mod_base = OTHER; note = 2'-OMe modified nucleotide
  modified_base 2: mod_base = OTHER; note = 2-deoxy-2-fluoro ribonucleotide
  modified_base 4: mod_base = OTHER; note = 2-deoxy-2-fluoro ribonucleotide
  modified_base 6: mod_base = OTHER; note = 2-deoxy-2-fluoro ribonucleotide
  modified_base 8: mod_base = OTHER; note = 2-deoxy-2-fluoro ribonucleotide
  modified_base 10: mod_base = OTHER; note = 2-deoxy-2-fluoro ribonucleotide
  modified_base 14: mod_base = OTHER; note = 2-deoxy-2-fluoro ribonucleotide
  modified_base 18: mod_base = OTHER; note = 2-deoxy-2-fluoro ribonucleotide
  modified_base 22: mod_base = OTHER; note = 2-deoxy-2-fluoro ribonucleotide
  modified_base 1..2: mod_base = OTHER; note = phosphorothioate internucleotide linkage
  modified_base 2..3: mod_base = OTHER; note = phosphorothioate internucleotide linkage
  modified_base 22..23: mod_base = OTHER; note = phosphorothioate internucleotide linkage
  modified_base 23..24: mod_base = OTHER; note = phosphorothioate internucleotide linkage
tgacacctgattctgtttctgagtat

SEQ ID NO: 844 - RNA, 26 nt, synthetic construct
  source 1..26: mol_type = other RNA
  modified_base 1: mod_base = OTHER; note = 2'-OMe modified nucleotide
  modified_base 3: mod_base = OTHER; note = 2'-OMe modified nucleotide
  modified_base 5: mod_base = OTHER; note = 2'-OMe modified nucleotide
  modified_base 7: mod_base = OTHER; note = 2'-OMe modified nucleotide
  modified_base 9: mod_base = OTHER; note = 2'-OMe modified nucleotide
  modified_base 11..13: mod_base = OTHER; note = 2'-OMe modified nucleotide
  modified_base 15: mod_base = OTHER; note = 2'-OMe modified nucleotide
  modified_base 17..21: mod_base = OTHER; note = 2'-OMe modified nucleotide
  modified_base 23..24: mod_base = OTHER; note = 2'-OMe modified nucleotide
  modified_base 26: mod_base = OTHER; note = 2'-OMe modified nucleotide
  modified_base 2: mod_base = OTHER; note = 2-deoxy-2-fluoro ribonucleotide
  modified_base 4: mod_base = OTHER; note = 2-deoxy-2-fluoro ribonucleotide
  modified_base 6: mod_base = OTHER; note = 2-deoxy-2-fluoro ribonucleotide
  modified_base 8: mod_base = OTHER; note = 2-deoxy-2-fluoro ribonucleotide
  modified_base 10: mod_base = OTHER; note = 2-deoxy-2-fluoro ribonucleotide
  modified_base 14: mod_base = OTHER; note = 2-deoxy-2-fluoro ribonucleotide
  modified_base 16: mod_base = OTHER; note = 2-deoxy-2-fluoro ribonucleotide
  modified_base 22: mod_base = OTHER; note = 2-deoxy-2-fluoro ribonucleotide
  modified_base 1..2: mod_base = OTHER; note = phosphorothioate internucleotide linkage
  modified_base 2..3: mod_base = OTHER; note = phosphorothioate internucleotide linkage
  modified_base 22..23: mod_base = OTHER; note = phosphorothioate internucleotide linkage
  modified_base 23..24: mod_base = OTHER; note = phosphorothioate internucleotide linkage
tgacacctgattctgtttctgagtat

SEQ ID NO: 845 - RNA, 26 nt, synthetic construct
  source 1..26: mol_type = other RNA
  modified_base 1: mod_base = OTHER; note = 2'-OMe modified nucleotide
  modified_base 3: mod_base = OTHER; note = 2'-OMe modified nucleotide
  modified_base 5: mod_base = OTHER; note = 2'-OMe modified nucleotide
  modified_base 7: mod_base = OTHER; note = 2'-OMe modified nucleotide
  modified_base 9: mod_base = OTHER; note = 2'-OMe modified nucleotide
  modified_base 11..13: mod_base = OTHER; note = 2'-OMe modified nucleotide
  modified_base 15..21: mod_base = OTHER; note = 2'-OMe modified nucleotide
  modified_base 23..24: mod_base = OTHER; note = 2'-OMe modified nucleotide
  modified_base 26: mod_base = OTHER; note = 2'-OMe modified nucleotide
  modified_base 2: mod_base = OTHER; note = 2-deoxy-2-fluoro ribonucleotide
  modified_base 4: mod_base = OTHER; note = 2-deoxy-2-fluoro ribonucleotide
  modified_base 6: mod_base = OTHER; note = 2-deoxy-2-fluoro ribonucleotide
  modified_base 8: mod_base = OTHER; note = 2-deoxy-2-fluoro ribonucleotide
  modified_base 10: mod_base = OTHER; note = 2-deoxy-2-fluoro ribonucleotide
  modified_base 14: mod_base = OTHER; note = 2-deoxy-2-fluoro ribonucleotide
  modified_base 22: mod_base = OTHER; note = 2-deoxy-2-fluoro ribonucleotide
  modified_base 1..2: mod_base = OTHER; note = phosphorothioate internucleotide linkage
  modified_base 2..3: mod_base = OTHER; note = phosphorothioate internucleotide linkage
  modified_base 22..23: mod_base = OTHER; note = phosphorothioate internucleotide linkage
  modified_base 23..24: mod_base = OTHER; note = phosphorothioate internucleotide linkage
tgacacctgattctgtttctgagtat

SEQ ID NO: 846 - RNA, 26 nt, synthetic construct
  source 1..26: mol_type = other RNA
  modified_base 1: mod_base = OTHER; note = 2'-OMe modified nucleotide
  modified_base 3: mod_base = OTHER; note = 2'-OMe modified nucleotide
  modified_base 5: mod_base = OTHER; note = 2'-OMe modified nucleotide
  modified_base 7: mod_base = OTHER; note = 2'-OMe modified nucleotide
  modified_base 9: mod_base = OTHER; note = 2'-OMe modified nucleotide
  modified_base 11..13: mod_base = OTHER; note = 2'-OMe modified nucleotide
  modified_base 15..19: mod_base = OTHER; note = 2'-OMe modified nucleotide
  modified_base 21..24: mod_base = OTHER; note = 2'-OMe modified nucleotide
  modified_base 26: mod_base = OTHER; note = 2'-OMe modified nucleotide
  modified_base 2: mod_base = OTHER; note = 2-deoxy-2-fluoro ribonucleotide
  modified_base 4: mod_base = OTHER; note = 2-deoxy-2-fluoro ribonucleotide
  modified_base 6: mod_base = OTHER; note = 2-deoxy-2-fluoro ribonucleotide
  modified_base 8: mod_base = OTHER; note = 2-deoxy-2-fluoro ribonucleotide
  modified_base 10: mod_base = OTHER; note = 2-deoxy-2-fluoro ribonucleotide
  modified_base 14: mod_base = OTHER; note = 2-deoxy-2-fluoro ribonucleotide
  modified_base 20: mod_base = OTHER; note = 2-deoxy-2-fluoro ribonucleotide
  modified_base 1..2: mod_base = OTHER; note = phosphorothioate internucleotide linkage
  modified_base 2..3: mod_base = OTHER; note = phosphorothioate internucleotide linkage
  modified_base 22..23: mod_base = OTHER; note = phosphorothioate internucleotide linkage
  modified_base 23..24: mod_base = OTHER; note = phosphorothioate internucleotide linkage
tgacacctgattctgtttctgagtat

SEQ ID NO: 847 - RNA, 26 nt, synthetic construct
  source 1..26: mol_type = other RNA
  modified_base 1: mod_base = OTHER; note = 2'-OMe modified nucleotide
  modified_base 3: mod_base = OTHER; note = 2'-OMe modified nucleotide
  modified_base 5: mod_base = OTHER; note = 2'-OMe modified nucleotide
  modified_base 7: mod_base = OTHER; note = 2'-OMe modified nucleotide
  modified_base 9: mod_base = OTHER; note = 2'-OMe modified nucleotide
  modified_base 11..13: mod_base = OTHER; note = 2'-OMe modified nucleotide
  modified_base 15..17: mod_base = OTHER; note = 2'-OMe modified nucleotide
  modified_base 19..24: mod_base = OTHER; note = 2'-OMe modified nucleotide
  modified_base 26: mod_base = OTHER; note = 2'-OMe modified nucleotide
  modified_base 2: mod_base = OTHER; note = 2-deoxy-2-fluoro ribonucleotide
  modified_base 4: mod_base = OTHER; note = 2-deoxy-2-fluoro ribonucleotide
  modified_base 6: mod_base = OTHER; note = 2-deoxy-2-fluoro ribonucleotide
  modified_base 8: mod_base = OTHER; note = 2-deoxy-2-fluoro ribonucleotide
  modified_base 10: mod_base = OTHER; note = 2-deoxy-2-fluoro ribonucleotide
  modified_base 14: mod_base = OTHER; note = 2-deoxy-2-fluoro ribonucleotide
  modified_base 18: mod_base = OTHER; note = 2-deoxy-2-fluoro ribonucleotide
  modified_base 1..2: mod_base = OTHER; note = phosphorothioate internucleotide linkage
  modified_base 2..3: mod_base = OTHER; note = phosphorothioate internucleotide linkage
  modified_base 22..23: mod_base = OTHER; note = phosphorothioate internucleotide linkage
  modified_base 23..24: mod_base = OTHER; note = phosphorothioate internucleotide linkage
tgacacctgattctgtttctgagtat

SEQ ID NO: 848 - RNA, 26 nt, synthetic construct
  source 1..26: mol_type = other RNA
  modified_base 1: mod_base = OTHER; note = 2'-deoxy nucleotide
  modified_base 3..7: mod_base = OTHER; note = 2'-OMe modified nucleotide
  modified_base 9: mod_base = OTHER; note = 2'-OMe modified nucleotide
  modified_base 11..13: mod_base = OTHER; note = 2'-OMe modified nucleotide
  modified_base 15: mod_base = OTHER; note = 2'-OMe modified nucleotide
  modified_base 17: mod_base = OTHER; note = 2'-OMe modified nucleotide
  modified_base 19: mod_base = OTHER; note = 2'-OMe modified nucleotide
  modified_base 21: mod_base = OTHER; note = 2'-OMe modified nucleotide
  modified_base 23..24: mod_base = OTHER; note = 2'-OMe modified nucleotide
  modified_base 26: mod_base = OTHER; note = 2'-OMe modified nucleotide
  modified_base 2: mod_base = OTHER; note = 2-deoxy-2-fluoro ribonucleotide
  modified_base 8: mod_base = OTHER; note = 2-deoxy-2-fluoro ribonucleotide
  modified_base 10: mod_base = OTHER; note = 2-deoxy-2-fluoro ribonucleotide
  modified_base 14: mod_base = OTHER; note = 2-deoxy-2-fluoro ribonucleotide
  modified_base 16: mod_base = OTHER; note = 2-deoxy-2-fluoro ribonucleotide
  modified_base 18: mod_base = OTHER; note = 2-deoxy-2-fluoro ribonucleotide
  modified_base 20: mod_base = OTHER; note = 2-deoxy-2-fluoro ribonucleotide
  modified_base 22: mod_base = OTHER; note = 2-deoxy-2-fluoro ribonucleotide
  modified_base 1..2: mod_base = OTHER; note = phosphorothioate internucleotide linkage
  modified_base 2..3: mod_base = OTHER; note = phosphorothioate internucleotide linkage
  modified_base 22..23: mod_base = OTHER; note = phosphorothioate internucleotide linkage
  modified_base 23..24: mod_base = OTHER; note = phosphorothioate internucleotide linkage
  modified_base 1: mod_base = OTHER; note = Thymine
tgacacctgattctgtttctgagtat

SEQ ID NO: 849 - RNA, 20 nt, synthetic construct
  source 1..20: mol_type = other RNA
  modified_base 20: mod_base = OTHER; note = inverted deoxyribonucleotide
  modified_base 2: mod_base = OTHER; note = 2'-OMe modified nucleotide
  modified_base 4: mod_base = OTHER; note = 2'-OMe modified nucleotide
  modified_base 6: mod_base = OTHER; note = 2'-OMe modified nucleotide
  modified_base 8: mod_base = OTHER; note = 2'-OMe modified nucleotide
  modified_base 10: mod_base = OTHER; note = 2'-OMe modified nucleotide
  modified_base 12: mod_base = OTHER; note = 2'-OMe modified nucleotide
  modified_base 14: mod_base = OTHER; note = 2'-OMe modified nucleotide
  modified_base 16: mod_base = OTHER; note = 2'-OMe modified nucleotide
  modified_base 18: mod_base = OTHER; note = 2'-OMe modified nucleotide
  modified_base 1: mod_base = OTHER; note = 2-deoxy-2-fluoro ribonucleotide
  modified_base 3: mod_base = OTHER; note = 2-deoxy-2-fluoro ribonucleotide
  modified_base 5: mod_base = OTHER; note = 2-deoxy-2-fluoro ribonucleotide
  modified_base 7: mod_base = OTHER; note = 2-deoxy-2-fluoro ribonucleotide
  modified_base 9: mod_base = OTHER; note = 2-deoxy-2-fluoro ribonucleotide
  modified_base 11: mod_base = OTHER; note = 2-deoxy-2-fluoro ribonucleotide
  modified_base 13: mod_base = OTHER; note = 2-deoxy-2-fluoro ribonucleotide
  modified_base 15: mod_base = OTHER; note = 2-deoxy-2-fluoro ribonucleotide
  modified_base 17: mod_base = OTHER; note = 2-deoxy-2-fluoro ribonucleotide
  modified_base 19: mod_base = OTHER; note = 2-deoxy-2-fluoro ribonucleotide
  modified_base 20: mod_base = OTHER; note = Thymine
acgcagaagggactgccgat

SEQ ID NO: 850 - RNA, 20 nt, synthetic construct
  source 1..20: mol_type = other RNA
  modified_base 20: mod_base = OTHER; note = inverted deoxyribonucleotide
  modified_base 2: mod_base = OTHER; note = 2'-OMe modified nucleotide
  modified_base 4: mod_base = OTHER; note = 2'-OMe modified nucleotide
  modified_base 6: mod_base = OTHER; note = 2'-OMe modified nucleotide
  modified_base 8: mod_base = OTHER; note = 2'-OMe modified nucleotide
  modified_base 10: mod_base = OTHER; note = 2'-OMe modified nucleotide
  modified_base 12: mod_base = OTHER; note = 2'-OMe modified nucleotide
  modified_base 14: mod_base = OTHER; note = 2'-OMe modified nucleotide
  modified_base 16: mod_base = OTHER; note = 2'-OMe modified nucleotide
  modified_base 18: mod_base = OTHER; note = 2'-OMe modified nucleotide
  modified_base 1: mod_base = OTHER; note = 2-deoxy-2-fluoro ribonucleotide
  modified_base 3: mod_base = OTHER; note = 2-deoxy-2-fluoro ribonucleotide
  modified_base 5: mod_base = OTHER; note = 2-deoxy-2-fluoro ribonucleotide
  modified_base 7: mod_base = OTHER; note = 2-deoxy-2-fluoro ribonucleotide
  modified_base 9: mod_base = OTHER; note = 2-deoxy-2-fluoro ribonucleotide
  modified_base 11: mod_base = OTHER; note = 2-deoxy-2-fluoro ribonucleotide
  modified_base 13: mod_base = OTHER; note = 2-deoxy-2-fluoro ribonucleotide
  modified_base 15: mod_base = OTHER; note = 2-deoxy-2-fluoro ribonucleotide
  modified_base 17: mod_base = OTHER; note = 2-deoxy-2-fluoro ribonucleotide
  modified_base 19: mod_base = OTHER; note = 2-deoxy-2-fluoro ribonucleotide
  modified_base 20: mod_base = OTHER; note = Thymine
ggggtgcaggagtgctacat

SEQ ID NO: 851 - RNA, 20 nt, synthetic construct
  source 1..20: mol_type = other RNA
  modified_base 20: mod_base = OTHER; note = inverted deoxyribonucleotide
  modified_base 2: mod_base = OTHER; note = 2'-OMe modified nucleotide
  modified_base 4: mod_base = OTHER; note = 2'-OMe modified nucleotide
  modified_base 6: mod_base = OTHER; note = 2'-OMe modified nucleotide
  modified_base 8: mod_base = OTHER; note = 2'-OMe modified nucleotide
  modified_base 10: mod_base = OTHER; note = 2'-OMe modified nucleotide
  modified_base 12: mod_base = OTHER; note = 2'-OMe modified nucleotide
  modified_base 14: mod_base = OTHER; note = 2'-OMe modified nucleotide
  modified_base 16: mod_base = OTHER; note = 2'-OMe modified nucleotide
  modified_base 18: mod_base = OTHER; note = 2'-OMe modified nucleotide
  modified_base 1: mod_base = OTHER; note = 2-deoxy-2-fluoro ribonucleotide
  modified_base 3: mod_base = OTHER; note = 2-deoxy-2-fluoro ribonucleotide
  modified_base 5: mod_base = OTHER; note = 2-deoxy-2-fluoro ribonucleotide
  modified_base 7: mod_base = OTHER; note = 2-deoxy-2-fluoro ribonucleotide
  modified_base 9: mod_base = OTHER; note = 2-deoxy-2-fluoro ribonucleotide
  modified_base 11: mod_base = OTHER; note = 2-deoxy-2-fluoro ribonucleotide
  modified_base 13: mod_base = OTHER; note = 2-deoxy-2-fluoro ribonucleotide
  modified_base 15: mod_base = OTHER; note = 2-deoxy-2-fluoro ribonucleotide
  modified_base 17: mod_base = OTHER; note = 2-deoxy-2-fluoro ribonucleotide
  modified_base 19: mod_base = OTHER; note = 2-deoxy-2-fluoro ribonucleotide
  modified_base 20: mod_base = OTHER; note = Thymine
ctgtggcagccccttattat

SEQ ID NO: 852 - RNA, 20 nt, synthetic construct
  source 1..20: mol_type = other RNA
  modified_base 20: mod_base = OTHER; note = inverted deoxyribonucleotide
  modified_base 2: mod_base = OTHER; note = 2'-OMe modified nucleotide
  modified_base 4: mod_base = OTHER; note = 2'-OMe modified nucleotide
  modified_base 6: mod_base = OTHER; note = 2'-OMe modified nucleotide
  modified_base 8: mod_base = OTHER; note = 2'-OMe modified nucleotide
  modified_base 10: mod_base = OTHER; note = 2'-OMe modified nucleotide
  modified_base 12: mod_base = OTHER; note = 2'-OMe modified nucleotide
  modified_base 14: mod_base = OTHER; note = 2'-OMe modified nucleotide
  modified_base 16: mod_base = OTHER; note = 2'-OMe modified nucleotide
  modified_base 18: mod_base = OTHER; note = 2'-OMe modified nucleotide
  modified_base 1: mod_base = OTHER; note = 2-deoxy-2-fluoro ribonucleotide
  modified_base 3: mod_base = OTHER; note = 2-deoxy-2-fluoro ribonucleotide
  modified_base 5: mod_base = OTHER; note = 2-deoxy-2-fluoro ribonucleotide
  modified_base 7: mod_base = OTHER; note = 2-deoxy-2-fluoro ribonucleotide
  modified_base 9: mod_base = OTHER; note = 2-deoxy-2-fluoro ribonucleotide
  modified_base 11: mod_base = OTHER; note = 2-deoxy-2-fluoro ribonucleotide
  modified_base 13: mod_base = OTHER; note = 2-deoxy-2-fluoro ribonucleotide
  modified_base 15: mod_base = OTHER; note = 2-deoxy-2-fluoro ribonucleotide
  modified_base 17: mod_base = OTHER; note = 2-deoxy-2-fluoro ribonucleotide
  modified_base 19: mod_base = OTHER; note = 2-deoxy-2-fluoro ribonucleotide
  modified_base 20: mod_base = OTHER; note = Thymine
ggcagccccttattgttaat

SEQ ID NO: 853 - RNA, 20 nt, synthetic construct
  source 1..20: mol_type = other RNA
  modified_base 20: mod_base = OTHER; note = inverted deoxyribonucleotide
  modified_base 2: mod_base = OTHER; note = 2'-OMe modified nucleotide
  modified_base 4: mod_base = OTHER; note = 2'-OMe modified nucleotide
  modified_base 6: mod_base = OTHER; note = 2'-OMe modified nucleotide
  modified_base 8: mod_base = OTHER; note = 2'-OMe modified nucleotide
  modified_base 10: mod_base = OTHER; note = 2'-OMe modified nucleotide
  modified_base 12: mod_base = OTHER; note = 2'-OMe modified nucleotide
  modified_base 14: mod_base = OTHER; note = 2'-OMe modified nucleotide
  modified_base 16: mod_base = OTHER; note = 2'-OMe modified nucleotide
  modified_base 18: mod_base = OTHER; note = 2'-OMe modified nucleotide
  modified_base 1: mod_base = OTHER; note = 2-deoxy-2-fluoro ribonucleotide
  modified_base 3: mod_base = OTHER; note = 2-deoxy-2-fluoro ribonucleotide
  modified_base 5: mod_base = OTHER; note = 2-deoxy-2-fluoro ribonucleotide
  modified_base 7: mod_base = OTHER; note = 2-deoxy-2-fluoro ribonucleotide
  modified_base 9: mod_base = OTHER; note = 2-deoxy-2-fluoro ribonucleotide
  modified_base 11: mod_base = OTHER; note = 2-deoxy-2-fluoro ribonucleotide
  modified_base 13: mod_base = OTHER; note = 2-deoxy-2-fluoro ribonucleotide
  modified_base 15: mod_base = OTHER; note = 2-deoxy-2-fluoro ribonucleotide
  modified_base 17: mod_base = OTHER; note = 2-deoxy-2-fluoro ribonucleotide
  modified_base 19: mod_base = OTHER; note = 2-deoxy-2-fluoro ribonucleotide
  modified_base 20: mod_base = OTHER; note = Thymine
agccccttattgttatacat

SEQ ID NO: 854 - RNA, 20 nt, synthetic construct
  source 1..20: mol_type = other RNA
  modified_base 20: mod_base = OTHER; note = inverted deoxyribonucleotide
  modified_base 2: mod_base = OTHER; note = 2'-OMe modified nucleotide
  modified_base 4: mod_base = OTHER; note = 2'-OMe modified nucleotide
  modified_base 6: mod_base = OTHER; note = 2'-OMe modified nucleotide
  modified_base 8: mod_base = OTHER; note = 2'-OMe modified nucleotide
  modified_base 10: mod_base = OTHER; note = 2'-OMe modified nucleotide
  modified_base 12: mod_base = OTHER; note = 2'-OMe modified nucleotide
  modified_base 14: mod_base = OTHER; note = 2'-OMe modified nucleotide
  modified_base 16: mod_base = OTHER; note = 2'-OMe modified nucleotide
  modified_base 18: mod_base = OTHER; note = 2'-OMe modified nucleotide
  modified_base 1: mod_base = OTHER; note = 2-deoxy-2-fluoro ribonucleotide
  modified_base 3: mod_base = OTHER; note = 2-deoxy-2-fluoro ribonucleotide
  modified_base 5: mod_base = OTHER; note = 2-deoxy-2-fluoro ribonucleotide
  modified_base 7: mod_base = OTHER; note = 2-deoxy-2-fluoro ribonucleotide
  modified_base 9: mod_base = OTHER; note = 2-deoxy-2-fluoro ribonucleotide
  modified_base 11: mod_base = OTHER; note = 2-deoxy-2-fluoro ribonucleotide
  modified_base 13: mod_base = OTHER; note = 2-deoxy-2-fluoro ribonucleotide
  modified_base 15: mod_base = OTHER; note = 2-deoxy-2-fluoro ribonucleotide
  modified_base 17: mod_base = OTHER; note = 2-deoxy-2-fluoro ribonucleotide
  modified_base 19: mod_base = OTHER; note = 2-deoxy-2-fluoro ribonucleotide
  modified_base 20: mod_base = OTHER; note = Thymine
gccccttattgttatacgat

SEQ ID NO: 855 - RNA, 20 nt, synthetic construct
  source 1..20: mol_type = other RNA
  modified_base 20: mod_base = OTHER; note = inverted deoxyribonucleotide
  modified_base 2: mod_base = OTHER; note = 2'-OMe modified nucleotide
  modified_base 4: mod_base = OTHER; note = 2'-OMe modified nucleotide
  modified_base 6: mod_base = OTHER; note = 2'-OMe modified nucleotide
  modified_base 8: mod_base = OTHER; note = 2'-OMe modified nucleotide
  modified_base 10: mod_base = OTHER; note = 2'-OMe modified nucleotide
  modified_base 12: mod_base = OTHER; note = 2'-OMe modified nucleotide
  modified_base 14: mod_base = OTHER; note = 2'-OMe modified nucleotide
  modified_base 16: mod_base = OTHER; note = 2'-OMe modified nucleotide
  modified_base 18: mod_base = OTHER; note = 2'-OMe modified nucleotide
  modified_base 1: mod_base = OTHER; note = 2-deoxy-2-fluoro ribonucleotide
  modified_base 3: mod_base = OTHER; note = 2-deoxy-2-fluoro ribonucleotide
  modified_base 5: mod_base = OTHER; note = 2-deoxy-2-fluoro ribonucleotide
  modified_base 7: mod_base = OTHER; note = 2-deoxy-2-fluoro ribonucleotide
  modified_base 9: mod_base = OTHER; note = 2-deoxy-2-fluoro ribonucleotide
  modified_base 11: mod_base = OTHER; note = 2-deoxy-2-fluoro ribonucleotide
  modified_base 13: mod_base = OTHER; note = 2-deoxy-2-fluoro ribonucleotide
  modified_base 15: mod_base = OTHER; note = 2-deoxy-2-fluoro ribonucleotide
  modified_base 17: mod_base = OTHER; note = 2-deoxy-2-fluoro ribonucleotide
  modified_base 19: mod_base = OTHER; note = 2-deoxy-2-fluoro ribonucleotide
  modified_base 20: mod_base = OTHER; note = Thymine
tgacacaatgctcagacgat

SEQ ID NO: 856 - RNA, 20 nt, synthetic construct
  source 1..20: mol_type = other RNA
  modified_base 20: mod_base = OTHER; note = inverted deoxyribonucleotide
  modified_base 2: mod_base = OTHER; note = 2'-OMe modified nucleotide
  modified_base 4: mod_base = OTHER; note = 2'-OMe modified nucleotide
  modified_base 6: mod_base = OTHER; note = 2'-OMe modified nucleotide
  modified_base 8: mod_base = OTHER; note = 2'-OMe modified nucleotide
  modified_base 10: mod_base = OTHER; note = 2'-OMe modified nucleotide
  modified_base 12: mod_base = OTHER; note = 2'-OMe modified nucleotide
  modified_base 14: mod_base = OTHER; note = 2'-OMe modified nucleotide
  modified_base 16: mod_base = OTHER; note = 2'-OMe modified nucleotide
  modified_base 18: mod_base = OTHER; note = 2'-OMe modified nucleotide
  modified_base 1: mod_base = OTHER; note = 2-deoxy-2-fluoro ribonucleotide
  modified_base 3: mod_base = OTHER; note = 2-deoxy-2-fluoro ribonucleotide
  modified_base 5: mod_base = OTHER; note = 2-deoxy-2-fluoro ribonucleotide
  modified_base 7: mod_base = OTHER; note = 2-deoxy-2-fluoro ribonucleotide
  modified_base 9: mod_base = OTHER; note = 2-deoxy-2-fluoro ribonucleotide
  modified_base 11: mod_base = OTHER; note = 2-deoxy-2-fluoro ribonucleotide
  modified_base 13: mod_base = OTHER; note = 2-deoxy-2-fluoro ribonucleotide
  modified_base 15: mod_base = OTHER; note = 2-deoxy-2-fluoro ribonucleotide
  modified_base 17: mod_base = OTHER; note = 2-deoxy-2-fluoro ribonucleotide
  modified_base 19: mod_base = OTHER; note = 2-deoxy-2-fluoro ribonucleotide
  modified_base 20: mod_base = OTHER; note = Thymine
gacacaatgctcagacgcat

SEQ ID NO: 857 - RNA, 20 nt, synthetic construct
  source 1..20: mol_type = other RNA
  modified_base 20: mod_base = OTHER; note = inverted deoxyribonucleotide
  modified_base 2: mod_base = OTHER; note = 2'-OMe modified nucleotide
  modified_base 4: mod_base = OTHER; note = 2'-OMe modified nucleotide
  modified_base 6: mod_base = OTHER; note = 2'-OMe modified nucleotide
  modified_base 8: mod_base = OTHER; note = 2'-OMe modified nucleotide
  modified_base 10: mod_base = OTHER; note = 2'-OMe modified nucleotide
  modified_base 12: mod_base = OTHER; note = 2'-OMe modified nucleotide
  modified_base 14: mod_base = OTHER; note = 2'-OMe modified nucleotide
  modified_base 16: mod_base = OTHER; note = 2'-OMe modified nucleotide
  modified_base 18: mod_base = OTHER; note = 2'-OMe modified nucleotide
  modified_base 1: mod_base = OTHER; note = 2-deoxy-2-fluoro ribonucleotide
  modified_base 3: mod_base = OTHER; note = 2-deoxy-2-fluoro ribonucleotide
  modified_base 5: mod_base = OTHER; note = 2-deoxy-2-fluoro ribonucleotide
  modified_base 7: mod_base = OTHER; note = 2-deoxy-2-fluoro ribonucleotide
  modified_base 9: mod_base = OTHER; note = 2-deoxy-2-fluoro ribonucleotide
  modified_base 11: mod_base = OTHER; note = 2-deoxy-2-fluoro ribonucleotide
  modified_base 13: mod_base = OTHER; note = 2-deoxy-2-fluoro ribonucleotide
  modified_base 15: mod_base = OTHER; note = 2-deoxy-2-fluoro ribonucleotide
  modified_base 17: mod_base = OTHER; note = 2-deoxy-2-fluoro ribonucleotide
  modified_base 19: mod_base = OTHER; note = 2-deoxy-2-fluoro ribonucleotide
  modified_base 20: mod_base = OTHER; note = Thymine
acacaatgctcagacgcaat

SEQ ID NO: 858 - RNA, 20 nt, synthetic construct
  source 1..20: mol_type = other RNA
  modified_base 20: mod_base = OTHER; note = inverted deoxyribonucleotide
  modified_base 2: mod_base = OTHER; note = 2'-OMe modified nucleotide
  modified_base 4: mod_base = OTHER; note = 2'-OMe modified nucleotide
  modified_base 6: mod_base = OTHER; note = 2'-OMe modified nucleotide
  modified_base 8: mod_base = OTHER; note = 2'-OMe modified nucleotide
  modified_base 10: mod_base = OTHER; note = 2'-OMe modified nucleotide
  modified_base 12: mod_base = OTHER; note = 2'-OMe modified nucleotide
  modified_base 14: mod_base = OTHER; note = 2'-OMe modified nucleotide
  modified_base 16: mod_base = OTHER; note = 2'-OMe modified nucleotide
  modified_base 18: mod_base = OTHER; note = 2'-OMe modified nucleotide
  modified_base 1: mod_base = OTHER; note = 2-deoxy-2-fluoro ribonucleotide
  modified_base 3: mod_base = OTHER; note = 2-deoxy-2-fluoro ribonucleotide
  modified_base 5: mod_base = OTHER; note = 2-deoxy-2-fluoro ribonucleotide
  modified_base 7: mod_base = OTHER; note = 2-deoxy-2-fluoro ribonucleotide
  modified_base 9: mod_base = OTHER; note = 2-deoxy-2-fluoro ribonucleotide
  modified_base 11: mod_base = OTHER; note = 2-deoxy-2-fluoro ribonucleotide
  modified_base 13: mod_base = OTHER; note = 2-deoxy-2-fluoro ribonucleotide
  modified_base 15: mod_base = OTHER; note = 2-deoxy-2-fluoro ribonucleotide
  modified_base 17: mod_base = OTHER; note = 2-deoxy-2-fluoro ribonucleotide
  modified_base 19: mod_base = OTHER; note = 2-deoxy-2-fluoro ribonucleotide
  modified_base 20: mod_base = OTHER; note = Thymine
acaatgctcagacgcagaat

SEQ ID NO: 859 - RNA, 20 nt, synthetic construct
  source 1..20: mol_type = other RNA
  modified_base 20: mod_base = OTHER; note = inverted deoxyribonucleotide
  modified_base 2: mod_base = OTHER; note = 2'-OMe modified nucleotide
  modified_base 4: mod_base = OTHER; note = 2'-OMe modified nucleotide
  modified_base 6: mod_base = OTHER; note = 2'-OMe modified nucleotide
  modified_base 8: mod_base = OTHER; note = 2'-OMe modified nucleotide
  modified_base 10: mod_base = OTHER; note = 2'-OMe modified nucleotide
  modified_base 12: mod_base = OTHER; note = 2'-OMe modified nucleotide
  modified_base 14: mod_base = OTHER; note = 2'-OMe modified nucleotide
  modified_base 16: mod_base = OTHER; note = 2'-OMe modified nucleotide
  modified_base 18: mod_base = OTHER; note = 2'-OMe modified nucleotide
  modified_base 1: mod_base = OTHER; note = 2-deoxy-2-fluoro ribonucleotide
  modified_base 3: mod_base = OTHER; note = 2-deoxy-2-fluoro ribonucleotide
  modified_base 5: mod_base = OTHER; note = 2-deoxy-2-fluoro ribonucleotide
  modified_base 7: mod_base = OTHER; note = 2-deoxy-2-fluoro ribonucleotide
  modified_base 9: mod_base = OTHER; note = 2-deoxy-2-fluoro ribonucleotide
  modified_base 11: mod_base = OTHER; note = 2-deoxy-2-fluoro ribonucleotide
  modified_base 13: mod_base = OTHER; note = 2-deoxy-2-fluoro ribonucleotide
  modified_base 15: mod_base = OTHER; note = 2-deoxy-2-fluoro ribonucleotide
  modified_base 17: mod_base = OTHER; note = 2-deoxy-2-fluoro ribonucleotide
  modified_base 19: mod_base = OTHER; note = 2-deoxy-2-fluoro ribonucleotide
  modified_base 20: mod_base = OTHER; note = Thymine
ctgccgaaatccagatccat

SEQ ID NO: 860 - RNA, 20 nt, synthetic construct
  source 1..20: mol_type = other RNA
  modified_base 20: mod_base = OTHER; note = inverted deoxyribonucleotide
  modified_base 2: mod_base = OTHER; note = 2'-OMe modified nucleotide
  modified_base 4: mod_base = OTHER; note = 2'-OMe modified nucleotide
  modified_base 6: mod_base = OTHER; note = 2'-OMe modified nucleotide
  modified_base 8: mod_base = OTHER; note = 2'-OMe modified nucleotide
  modified_base 10: mod_base = OTHER; note = 2'-OMe modified nucleotide
  modified_base 12: mod_base = OTHER; note = 2'-OMe modified nucleotide
  modified_base 14: mod_base = OTHER; note = 2'-OMe modified nucleotide
  modified_base 16: mod_base = OTHER; note = 2'-OMe modified nucleotide
  modified_base 18: mod_base = OTHER; note = 2'-OMe modified nucleotide
  modified_base 1: mod_base = OTHER; note = 2-deoxy-2-fluoro ribonucleotide
  modified_base 3: mod_base = OTHER; note = 2-deoxy-2-fluoro ribonucleotide
  modified_base 5: mod_base = OTHER; note = 2-deoxy-2-fluoro ribonucleotide
  modified_base 7: mod_base = OTHER; note = 2-deoxy-2-fluoro ribonucleotide
  modified_base 9: mod_base = OTHER; note = 2-deoxy-2-fluoro ribonucleotide
  modified_base 11: mod_base = OTHER; note = 2-deoxy-2-fluoro ribonucleotide
  modified_base 13: mod_base = OTHER; note = 2-deoxy-2-fluoro ribonucleotide
  modified_base 15: mod_base = OTHER; note = 2-deoxy-2-fluoro ribonucleotide
  modified_base 17: mod_base = OTHER; note = 2-deoxy-2-fluoro ribonucleotide
  modified_base 19: mod_base = OTHER; note = 2-deoxy-2-fluoro ribonucleotide
  modified_base 20: mod_base = OTHER; note = Thymine
gccgaaatccagatcctgat

SEQ ID NO: 861 - RNA, 20 nt, synthetic construct
  source 1..20: mol_type = other RNA
  modified_base 20: mod_base = OTHER; note = inverted deoxyribonucleotide
  modified_base 2: mod_base = OTHER; note = 2'-OMe modified nucleotide
  modified_base 4: mod_base = OTHER; note = 2'-OMe modified nucleotide
  modified_base 6: mod_base = OTHER; note = 2'-OMe modified nucleotide
  modified_base 8: mod_base = OTHER; note = 2'-OMe modified nucleotide
  modified_base 10: mod_base = OTHER; note = 2'-OMe modified nucleotide
  modified_base 12: mod_base = OTHER; note = 2'-OMe modified nucleotide
  modified_base 14: mod_base = OTHER; note = 2'-OMe modified nucleotide
  modified_base 16: mod_base = OTHER; note = 2'-OMe modified nucleotide
  modified_base 18: mod_base = OTHER; note = 2'-OMe modified nucleotide
  modified_base 1: mod_base = OTHER; note = 2-deoxy-2-fluoro ribonucleotide
  modified_base 3: mod_base = OTHER; note = 2-deoxy-2-fluoro ribonucleotide
  modified_base 5: mod_base = OTHER; note = 2-deoxy-2-fluoro ribonucleotide
  modified_base 7: mod_base = OTHER; note = 2-deoxy-2-fluoro ribonucleotide
  modified_base 9: mod_base = OTHER; note = 2-deoxy-2-fluoro ribonucleotide
  modified_base 11: mod_base = OTHER; note = 2-deoxy-2-fluoro ribonucleotide
  modified_base 13: mod_base = OTHER; note = 2-deoxy-2-fluoro ribonucleotide
  modified_base 15: mod_base = OTHER; note = 2-deoxy-2-fluoro ribonucleotide
  modified_base 17: mod_base = OTHER; note = 2-deoxy-2-fluoro ribonucleotide
  modified_base 19: mod_base = OTHER; note = 2-deoxy-2-fluoro ribonucleotide
  modified_base 20: mod_base = OTHER; note = Thymine
tgacacgatgctcagatgat

SEQ ID NO: 862 - RNA, 20 nt, synthetic construct
  source 1..20: mol_type = other RNA
  modified_base 20: mod_base = OTHER; note = inverted deoxyribonucleotide
  modified_base 2: mod_base = OTHER; note = 2'-OMe modified nucleotide
  modified_base 4: mod_base = OTHER; note = 2'-OMe modified nucleotide
  modified_base 6: mod_base = OTHER; note = 2'-OMe modified nucleotide
  modified_base 8: mod_base = OTHER; note = 2'-OMe modified nucleotide
  modified_base 10: mod_base = OTHER; note = 2'-OMe modified nucleotide
  modified_base 12: mod_base = OTHER; note = 2'-OMe modified nucleotide
  modified_base 14: mod_base = OTHER; note = 2'-OMe modified nucleotide
  modified_base 16: mod_base = OTHER; note = 2'-OMe modified nucleotide
  modified_base 18: mod_base = OTHER; note = 2'-OMe modified nucleotide
  modified_base 1: mod_base = OTHER; note = 2-deoxy-2-fluoro ribonucleotide
  modified_base 3: mod_base = OTHER; note = 2-deoxy-2-fluoro ribonucleotide
  modified_base 5: mod_base = OTHER; note = 2-deoxy-2-fluoro ribonucleotide
  modified_base 7: mod_base = OTHER; note = 2-deoxy-2-fluoro ribonucleotide
  modified_base 9: mod_base = OTHER; note = 2-deoxy-2-fluoro ribonucleotide
  modified_base 11: mod_base = OTHER; note = 2-deoxy-2-fluoro ribonucleotide
  modified_base 13: mod_base = OTHER; note = 2-deoxy-2-fluoro ribonucleotide
  modified_base 15: mod_base = OTHER; note = 2-deoxy-2-fluoro ribonucleotide
  modified_base 17: mod_base = OTHER; note = 2-deoxy-2-fluoro ribonucleotide
  modified_base 19: mod_base = OTHER; note = 2-deoxy-2-fluoro ribonucleotide
  modified_base 20: mod_base = OTHER; note = Thymine
gacacgatgctcagatgcat

SEQ ID NO: 863 - RNA, 20 nt, synthetic construct
  source 1..20: mol_type = other RNA
  modified_base 20: mod_base = OTHER; note = inverted deoxyribonucleotide
  modified_base 2: mod_base = OTHER; note = 2'-OMe modified nucleotide
  modified_base 4: mod_base = OTHER; note = 2'-OMe modified nucleotide
  modified_base 6: mod_base = OTHER; note = 2'-OMe modified nucleotide
  modified_base 8: mod_base = OTHER; note = 2'-OMe modified nucleotide
  modified_base 10: mod_base = OTHER; note = 2'-OMe modified nucleotide
  modified_base 12: mod_base = OTHER; note = 2'-OMe modified nucleotide
  modified_base 14: mod_base = OTHER; note = 2'-OMe modified nucleotide
  modified_base 16: mod_base = OTHER; note = 2'-OMe modified nucleotide
  modified_base 18: mod_base = OTHER; note = 2'-OMe modified nucleotide
  modified_base 1: mod_base = OTHER; note = 2-deoxy-2-fluoro ribonucleotide
  modified_base 3: mod_base = OTHER; note = 2-deoxy-2-fluoro ribonucleotide
  modified_base 5: mod_base = OTHER; note = 2-deoxy-2-fluoro ribonucleotide
  modified_base 7: mod_base = OTHER; note = 2-deoxy-2-fluoro ribonucleotide
  modified_base 9: mod_base = OTHER; note = 2-deoxy-2-fluoro ribonucleotide
  modified_base 11: mod_base = OTHER; note = 2-deoxy-2-fluoro ribonucleotide
  modified_base 13: mod_base = OTHER; note = 2-deoxy-2-fluoro ribonucleotide
  modified_base 15: mod_base = OTHER; note = 2-deoxy-2-fluoro ribonucleotide
  modified_base 17: mod_base = OTHER; note = 2-deoxy-2-fluoro ribonucleotide
  modified_base 19: mod_base = OTHER; note = 2-deoxy-2-fluoro ribonucleotide
  modified_base 20: mod_base = OTHER; note = Thymine
acacgatgctcagatgcaat

SEQ ID NO: 864 - RNA, 20 nt, synthetic construct
  source 1..20: mol_type = other RNA
  modified_base 20: mod_base = OTHER; note = inverted deoxyribonucleotide
  modified_base 2: mod_base = OTHER; note = 2'-OMe modified nucleotide
  modified_base 4: mod_base = OTHER; note = 2'-OMe modified nucleotide
  modified_base 6: mod_base = OTHER; note = 2'-OMe modified nucleotide
  modified_base 8: mod_base = OTHER; note = 2'-OMe modified nucleotide
  modified_base 10: mod_base = OTHER; note = 2'-OMe modified nucleotide
  modified_base 12: mod_base = OTHER; note = 2'-OMe modified nucleotide
  modified_base 14: mod_base = OTHER; note = 2'-OMe modified nucleotide
  modified_base 16: mod_base = OTHER; note = 2'-OMe modified nucleotide
  modified_base 18: mod_base = OTHER; note = 2'-OMe modified nucleotide
  modified_base 1: mod_base = OTHER; note = 2-deoxy-2-fluoro ribonucleotide
  modified_base 3: mod_base = OTHER; note = 2-deoxy-2-fluoro ribonucleotide
  modified_base 5: mod_base = OTHER; note = 2-deoxy-2-fluoro ribonucleotide
  modified_base 7: mod_base = OTHER; note = 2-deoxy-2-fluoro ribonucleotide
  modified_base 9: mod_base = OTHER; note = 2-deoxy-2-fluoro ribonucleotide
  modified_base 11: mod_base = OTHER; note = 2-deoxy-2-fluoro ribonucleotide
  modified_base 13: mod_base = OTHER; note = 2-deoxy-2-fluoro ribonucleotide
  modified_base 15: mod_base = OTHER; note = 2-deoxy-2-fluoro ribonucleotide
  modified_base 17: mod_base = OTHER; note = 2-deoxy-2-fluoro ribonucleotide
  modified_base 19: mod_base = OTHER; note = 2-deoxy-2-fluoro ribonucleotide
  modified_base 20: mod_base = OTHER; note = Thymine
acgatgctcagatgcagaat

SEQ ID NO: 865 - RNA, 20 nt, synthetic construct
  source 1..20: mol_type = other RNA
  modified_base 20: mod_base = OTHER; note = inverted deoxyribonucleotide
  modified_base 2: mod_base = OTHER; note = 2'-OMe modified nucleotide
  modified_base 4: mod_base = OTHER; note = 2'-OMe modified nucleotide
  modified_base 6: mod_base = OTHER; note = 2'-OMe modified nucleotide
  modified_base 8: mod_base = OTHER; note = 2'-OMe modified nucleotide
  modified_base 10: mod_base = OTHER; note = 2'-OMe modified nucleotide
  modified_base 12: mod_base = OTHER; note = 2'-OMe modified nucleotide
  modified_base 14: mod_base = OTHER; note = 2'-OMe modified nucleotide
  modified_base 16: mod_base = OTHER; note = 2'-OMe modified nucleotide
  modified_base 18: mod_base = OTHER; note = 2'-OMe modified nucleotide
  modified_base 1: mod_base = OTHER; note = 2-deoxy-2-fluoro ribonucleotide
  modified_base 3: mod_base = OTHER; note = 2-deoxy-2-fluoro ribonucleotide
  modified_base 5: mod_base = OTHER; note = 2-deoxy-2-fluoro ribonucleotide
  modified_base 7: mod_base = OTHER; note = 2-deoxy-2-fluoro ribonucleotide
  modified_base 9: mod_base = OTHER; note = 2-deoxy-2-fluoro ribonucleotide
  modified_base 11: mod_base = OTHER; note = 2-deoxy-2-fluoro ribonucleotide
  modified_base 13: mod_base = OTHER; note = 2-deoxy-2-fluoro ribonucleotide
  modified_base 15: mod_base = OTHER; note = 2-deoxy-2-fluoro ribonucleotide
  modified_base 17: mod_base = OTHER; note = 2-deoxy-2-fluoro ribonucleotide
  modified_base 19: mod_base = OTHER; note = 2-deoxy-2-fluoro ribonucleotide
  modified_base 20: mod_base = OTHER; note = Thymine
tccaagcctagaggctttat

SEQ ID NO: 866 - RNA, 20 nt, synthetic construct
  source 1..20: mol_type = other RNA
  modified_base 20: mod_base = OTHER; note = inverted deoxyribonucleotide
  modified_base 2: mod_base = OTHER; note = 2'-OMe modified nucleotide
  modified_base 4: mod_base = OTHER; note = 2'-OMe modified nucleotide
  modified_base 6: mod_base = OTHER; note = 2'-OMe modified nucleotide
  modified_base 8: mod_base = OTHER; note = 2'-OMe modified nucleotide
  modified_base 10: mod_base = OTHER; note = 2'-OMe modified nucleotide
  modified_base 12: mod_base = OTHER; note = 2'-OMe modified nucleotide
  modified_base 14: mod_base = OTHER; note = 2'-OMe modified nucleotide
  modified_base 16: mod_base = OTHER; note = 2'-OMe modified nucleotide
  modified_base 18: mod_base = OTHER; note = 2'-OMe modified nucleotide
  modified_base 1: mod_base = OTHER; note = 2-deoxy-2-fluoro ribonucleotide
  modified_base 3: mod_base = OTHER; note = 2-deoxy-2-fluoro ribonucleotide
  modified_base 5: mod_base = OTHER; note = 2-deoxy-2-fluoro ribonucleotide
  modified_base 7: mod_base = OTHER; note = 2-deoxy-2-fluoro ribonucleotide
  modified_base 9: mod_base = OTHER; note = 2-deoxy-2-fluoro ribonucleotide
  modified_base 11: mod_base = OTHER; note = 2-deoxy-2-fluoro ribonucleotide
  modified_base 13: mod_base = OTHER; note = 2-deoxy-2-fluoro ribonucleotide
  modified_base 15: mod_base = OTHER; note = 2-deoxy-2-fluoro ribonucleotide
  modified_base 17: mod_base = OTHER; note = 2-deoxy-2-fluoro ribonucleotide
  modified_base 19: mod_base = OTHER; note = 2-deoxy-2-fluoro ribonucleotide
  modified_base 20: mod_base = OTHER; note = Thymine
aggaaacccccggggtacat

SEQ ID NO: 867 - RNA, 20 nt, synthetic construct
  source 1..20: mol_type = other RNA
  modified_base 20: mod_base = OTHER; note = inverted deoxyribonucleotide
  modified_base 2: mod_base = OTHER; note = 2'-OMe modified nucleotide
  modified_base 4: mod_base = OTHER; note = 2'-OMe modified nucleotide
  modified_base 6: mod_base = OTHER; note = 2'-OMe modified nucleotide
  modified_base 8: mod_base = OTHER; note = 2'-OMe modified nucleotide
  modified_base 10: mod_base = OTHER; note = 2'-OMe modified nucleotide
  modified_base 12: mod_base = OTHER; note = 2'-OMe modified nucleotide
  modified_base 14: mod_base = OTHER; note = 2'-OMe modified nucleotide
  modified_base 16: mod_base = OTHER; note = 2'-OMe modified nucleotide
  modified_base 18: mod_base = OTHER; note = 2'-OMe modified nucleotide
  modified_base 1: mod_base = OTHER; note = 2-deoxy-2-fluoro ribonucleotide
  modified_base 3: mod_base = OTHER; note = 2-deoxy-2-fluoro ribonucleotide
  modified_base 5: mod_base = OTHER; note = 2-deoxy-2-fluoro ribonucleotide
  modified_base 7: mod_base = OTHER; note = 2-deoxy-2-fluoro ribonucleotide
  modified_base 9: mod_base = OTHER; note = 2-deoxy-2-fluoro ribonucleotide
  modified_base 11: mod_base = OTHER; note = 2-deoxy-2-fluoro ribonucleotide
  modified_base 13: mod_base = OTHER; note = 2-deoxy-2-fluoro ribonucleotide
  modified_base 15: mod_base = OTHER; note = 2-deoxy-2-fluoro ribonucleotide
  modified_base 17: mod_base = OTHER; note = 2-deoxy-2-fluoro ribonucleotide
  modified_base 19: mod_base = OTHER; note = 2-deoxy-2-fluoro ribonucleotide
  modified_base 20: mod_base = OTHER; note = Thymine
ggaaacccccggggtacaat

SEQ ID NO: 868 - RNA, 20 nt, synthetic construct
  source 1..20: mol_type = other RNA
  modified_base 20: mod_base = OTHER; note = inverted deoxyribonucleotide
  modified_base 2: mod_base = OTHER; note = 2'-OMe modified nucleotide
  modified_base 4: mod_base = OTHER; note = 2'-OMe modified nucleotide
  modified_base 6: mod_base = OTHER; note = 2'-OMe modified nucleotide
  modified_base 8: mod_base = OTHER; note = 2'-OMe modified nucleotide
  modified_base 10: mod_base = OTHER; note = 2'-OMe modified nucleotide
  modified_base 12: mod_base = OTHER; note = 2'-OMe modified nucleotide
  modified_base 14: mod_base = OTHER; note = 2'-OMe modified nucleotide
  modified_base 16: mod_base = OTHER; note = 2'-OMe modified nucleotide
  modified_base 18: mod_base = OTHER; note = 2'-OMe modified nucleotide
  modified_base 1: mod_base = OTHER; note = 2-deoxy-2-fluoro ribonucleotide
  modified_base 3: mod_base = OTHER; note = 2-deoxy-2-fluoro ribonucleotide
  modified_base 5: mod_base = OTHER; note = 2-deoxy-2-fluoro ribonucleotide
  modified_base 7: mod_base = OTHER; note = 2-deoxy-2-fluoro ribonucleotide
  modified_base 9: mod_base = OTHER; note = 2-deoxy-2-fluoro ribonucleotide
  modified_base 11: mod_base = OTHER; note = 2-deoxy-2-fluoro ribonucleotide
  modified_base 13: mod_base = OTHER; note = 2-deoxy-2-fluoro ribonucleotide
  modified_base 15: mod_base = OTHER; note = 2-deoxy-2-fluoro ribonucleotide
  modified_base 17: mod_base = OTHER; note = 2-deoxy-2-fluoro ribonucleotide
  modified_base 19: mod_base = OTHER; note = 2-deoxy-2-fluoro ribonucleotide
  modified_base 20: mod_base = OTHER; note = Thymine
gaaacccccggggtacagat

SEQ ID NO: 869 - RNA, 20 nt, synthetic construct
  source 1..20: mol_type = other RNA
  modified_base 20: mod_base = OTHER; note = inverted deoxyribonucleotide
  modified_base 2: mod_base = OTHER; note = 2'-OMe modified nucleotide
  modified_base 4: mod_base = OTHER; note = 2'-OMe modified nucleotide
  modified_base 6: mod_base = OTHER; note = 2'-OMe modified nucleotide
  modified_base 8: mod_base = OTHER; note = 2'-OMe modified nucleotide
  modified_base 10: mod_base = OTHER; note = 2'-OMe modified nucleotide
  modified_base 12: mod_base = OTHER; note = 2'-OMe modified nucleotide
  modified_base 14: mod_base = OTHER; note = 2'-OMe modified nucleotide
  modified_base 16: mod_base = OTHER; note = 2'-OMe modified nucleotide
  modified_base 18: mod_base = OTHER; note = 2'-OMe modified nucleotide
  modified_base 1: mod_base = OTHER; note = 2-deoxy-2-fluoro ribonucleotide
  modified_base 3: mod_base = OTHER; note = 2-deoxy-2-fluoro ribonucleotide
  modified_base 5: mod_base = OTHER; note = 2-deoxy-2-fluoro ribonucleotide
  modified_base 7: mod_base = OTHER; note = 2-deoxy-2-fluoro ribonucleotide
  modified_base 9: mod_base = OTHER; note = 2-deoxy-2-fluoro ribonucleotide
  modified_base 11: mod_base = OTHER; note = 2-deoxy-2-fluoro ribonucleotide
  modified_base 13: mod_base = OTHER; note = 2-deoxy-2-fluoro ribonucleotide
  modified_base 15: mod_base = OTHER; note = 2-deoxy-2-fluoro ribonucleotide
  modified_base 17: mod_base = OTHER; note = 2-deoxy-2-fluoro ribonucleotide
  modified_base 19: mod_base = OTHER; note = 2-deoxy-2-fluoro ribonucleotide
  modified_base 20: mod_base = OTHER; note = Thymine
tgctactaccattatggaat

SEQ ID NO: 870 - RNA, 20 nt, synthetic construct
  source 1..20: mol_type = other RNA
  modified_base 20: mod_base = OTHER; note = inverted deoxyribonucleotide
  modified_base 2: mod_base = OTHER; note = 2'-OMe modified nucleotide
  modified_base 4: mod_base = OTHER; note = 2'-OMe modified nucleotide
  modified_base 6: mod_base = OTHER; note = 2'-OMe modified nucleotide
  modified_base 8: mod_base = OTHER; note = 2'-OMe modified nucleotide
  modified_base 10: mod_base = OTHER; note = 2'-OMe modified nucleotide
  modified_base 12: mod_base = OTHER; note = 2'-OMe modified nucleotide
  modified_base 14: mod_base = OTHER; note = 2'-OMe modified nucleotide
  modified_base 16: mod_base = OTHER; note = 2'-OMe modified nucleotide
  modified_base 18: mod_base = OTHER; note = 2'-OMe modified nucleotide
  modified_base 1: mod_base = OTHER; note = 2-deoxy-2-fluoro ribonucleotide
  modified_base 3: mod_base = OTHER; note = 2-deoxy-2-fluoro ribonucleotide
  modified_base 5: mod_base = OTHER; note = 2-deoxy-2-fluoro ribonucleotide
  modified_base 7: mod_base = OTHER; note = 2-deoxy-2-fluoro ribonucleotide
  modified_base 9: mod_base = OTHER; note = 2-deoxy-2-fluoro ribonucleotide
  modified_base 11: mod_base = OTHER; note = 2-deoxy-2-fluoro ribonucleotide
  modified_base 13: mod_base = OTHER; note = 2-deoxy-2-fluoro ribonucleotide
  modified_base 15: mod_base = OTHER; note = 2-deoxy-2-fluoro ribonucleotide
  modified_base 17: mod_base = OTHER; note = 2-deoxy-2-fluoro ribonucleotide
  modified_base 19: mod_base = OTHER; note = 2-deoxy-2-fluoro ribonucleotide
  modified_base 20: mod_base = OTHER; note = Thymine
gctactaccattatggacat

SEQ ID NO: 871 - RNA, 20 nt, synthetic construct
  source 1..20: mol_type = other RNA
  modified_base 20: mod_base = OTHER; note = inverted deoxyribonucleotide
  modified_base 2: mod_base = OTHER; note = 2'-OMe modified nucleotide
  modified_base 4: mod_base = OTHER; note = 2'-OMe modified nucleotide
  modified_base 6: mod_base = OTHER; note = 2'-OMe modified nucleotide
  modified_base 8: mod_base = OTHER; note = 2'-OMe modified nucleotide
  modified_base 10: mod_base = OTHER; note = 2'-OMe modified nucleotide
  modified_base 12: mod_base = OTHER; note = 2'-OMe modified nucleotide
  modified_base 14: mod_base = OTHER; note = 2'-OMe modified nucleotide
  modified_base 16: mod_base = OTHER; note = 2'-OMe modified nucleotide
  modified_base 18: mod_base = OTHER; note = 2'-OMe modified nucleotide
  modified_base 1: mod_base = OTHER; note = 2-deoxy-2-fluoro ribonucleotide
  modified_base 3: mod_base = OTHER; note = 2-deoxy-2-fluoro ribonucleotide
  modified_base 5: mod_base = OTHER; note = 2-deoxy-2-fluoro ribonucleotide
  modified_base 7: mod_base = OTHER; note = 2-deoxy-2-fluoro ribonucleotide
  modified_base 9: mod_base = OTHER; note = 2-deoxy-2-fluoro ribonucleotide
  modified_base 11: mod_base = OTHER; note = 2-deoxy-2-fluoro ribonucleotide
  modified_base 13: mod_base = OTHER; note = 2-deoxy-2-fluoro ribonucleotide
  modified_base 15: mod_base = OTHER; note = 2-deoxy-2-fluoro ribonucleotide
  modified_base 17: mod_base = OTHER; note = 2-deoxy-2-fluoro ribonucleotide
  modified_base 19: mod_base = OTHER; note = 2-deoxy-2-fluoro ribonucleotide
  modified_base 20: mod_base = OTHER; note = Thymine
ctaccattatggacagagat

SEQ ID NO: 872 - RNA, 20 nt, synthetic construct
  source 1..20: mol_type = other RNA
  modified_base 20: mod_base = OTHER; note = inverted deoxyribonucleotide
  modified_base 2: mod_base = OTHER; note = 2'-OMe modified nucleotide
  modified_base 4: mod_base = OTHER; note = 2'-OMe modified nucleotide
  modified_base 6: mod_base = OTHER; note = 2'-OMe modified nucleotide
  modified_base 8: mod_base = OTHER; note = 2'-OMe modified nucleotide
  modified_base 10: mod_base = OTHER; note = 2'-OMe modified nucleotide
  modified_base 12: mod_base = OTHER; note = 2'-OMe modified nucleotide
  modified_base 14: mod_base = OTHER; note = 2'-OMe modified nucleotide
  modified_base 16: mod_base = OTHER; note = 2'-OMe modified nucleotide
  modified_base 18: mod_base = OTHER; note = 2'-OMe modified nucleotide
  modified_base 1: mod_base = OTHER; note = 2-deoxy-2-fluoro ribonucleotide
  modified_base 3: mod_base = OTHER; note = 2-deoxy-2-fluoro ribonucleotide
  modified_base 5: mod_base = OTHER; note = 2-deoxy-2-fluoro ribonucleotide
  modified_base 7: mod_base = OTHER; note = 2-deoxy-2-fluoro ribonucleotide
  modified_base 9: mod_base = OTHER; note = 2-deoxy-2-fluoro ribonucleotide
  modified_base 11: mod_base = OTHER; note = 2-deoxy-2-fluoro ribonucleotide
  modified_base 13: mod_base = OTHER; note = 2-deoxy-2-fluoro ribonucleotide
  modified_base 15: mod_base = OTHER; note = 2-deoxy-2-fluoro ribonucleotide
  modified_base 17: mod_base = OTHER; note = 2-deoxy-2-fluoro ribonucleotide
  modified_base 19: mod_base = OTHER; note = 2-deoxy-2-fluoro ribonucleotide
  modified_base 20: mod_base = OTHER; note = Thymine
accacaccagcatagtcgat

SEQ ID NO: 873 - RNA, 20 nt, synthetic construct
  source 1..20: mol_type = other RNA
  modified_base 20: mod_base = OTHER; note = inverted deoxyribonucleotide
  modified_base 2: mod_base = OTHER; note = 2'-OMe modified nucleotide
  modified_base 4: mod_base = OTHER; note = 2'-OMe modified nucleotide
  modified_base 6: mod_base = OTHER; note = 2'-OMe modified nucleotide
  modified_base 8: mod_base = OTHER; note = 2'-OMe modified nucleotide
  modified_base 10: mod_base = OTHER; note = 2'-OMe modified nucleotide
  modified_base 12: mod_base = OTHER; note = 2'-OMe modified nucleotide
  modified_base 14: mod_base = OTHER; note = 2'-OMe modified nucleotide
  modified_base 16: mod_base = OTHER; note = 2'-OMe modified nucleotide
  modified_base 18: mod_base = OTHER; note = 2'-OMe modified nucleotide
  modified_base 1: mod_base = OTHER; note = 2-deoxy-2-fluoro ribonucleotide
  modified_base 3: mod_base = OTHER; note = 2-deoxy-2-fluoro ribonucleotide
  modified_base 5: mod_base = OTHER; note = 2-deoxy-2-fluoro ribonucleotide
  modified_base 7: mod_base = OTHER; note = 2-deoxy-2-fluoro ribonucleotide
  modified_base 9: mod_base = OTHER; note = 2-deoxy-2-fluoro ribonucleotide
  modified_base 11: mod_base = OTHER; note = 2-deoxy-2-fluoro ribonucleotide
  modified_base 13: mod_base = OTHER; note = 2-deoxy-2-fluoro ribonucleotide
  modified_base 15: mod_base = OTHER; note = 2-deoxy-2-fluoro ribonucleotide
  modified_base 17: mod_base = OTHER; note = 2-deoxy-2-fluoro ribonucleotide
  modified_base 19: mod_base = OTHER; note = 2-deoxy-2-fluoro ribonucleotide
  modified_base 20: mod_base = OTHER; note = Thymine
ccacaccagcatagtcggat

SEQ ID NO: 874 - RNA, 20 nt, synthetic construct
  source 1..20: mol_type = other RNA
  modified_base 20: mod_base = OTHER; note = inverted deoxyribonucleotide
  modified_base 2: mod_base = OTHER; note = 2'-OMe modified nucleotide
  modified_base 4: mod_base = OTHER; note = 2'-OMe modified nucleotide
  modified_base 6: mod_base = OTHER; note = 2'-OMe modified nucleotide
  modified_base 8: mod_base = OTHER; note = 2'-OMe modified nucleotide
  modified_base 10: mod_base = OTHER; note = 2'-OMe modified nucleotide
  modified_base 12: mod_base = OTHER; note = 2'-OMe modified nucleotide
  modified_base 14: mod_base = OTHER; note = 2'-OMe modified nucleotide
  modified_base 16: mod_base = OTHER; note = 2'-OMe modified nucleotide
  modified_base 18: mod_base = OTHER; note = 2'-OMe modified nucleotide
  modified_base 1: mod_base = OTHER; note = 2-deoxy-2-fluoro ribonucleotide
  modified_base 3: mod_base = OTHER; note = 2-deoxy-2-fluoro ribonucleotide
  modified_base 5: mod_base = OTHER; note = 2-deoxy-2-fluoro ribonucleotide
  modified_base 7: mod_base = OTHER; note = 2-deoxy-2-fluoro ribonucleotide
  modified_base 9: mod_base = OTHER; note = 2-deoxy-2-fluoro ribonucleotide
  modified_base 11: mod_base = OTHER; note = 2-deoxy-2-fluoro ribonucleotide
  modified_base 13: mod_base = OTHER; note = 2-deoxy-2-fluoro ribonucleotide
  modified_base 15: mod_base = OTHER; note = 2-deoxy-2-fluoro ribonucleotide
  modified_base 17: mod_base = OTHER; note = 2-deoxy-2-fluoro ribonucleotide
  modified_base 19: mod_base = OTHER; note = 2-deoxy-2-fluoro ribonucleotide
  modified_base 20: mod_base = OTHER; note = Thymine
cacaccagcatagtcggaat

SEQ ID NO: 875 - RNA, 20 nt, synthetic construct
  source 1..20: mol_type = other RNA
  modified_base 20: mod_base = OTHER; note = inverted deoxyribonucleotide
  modified_base 2: mod_base = OTHER; note = 2'-OMe modified nucleotide
  modified_base 4: mod_base = OTHER; note = 2'-OMe modified nucleotide
  modified_base 6: mod_base = OTHER; note = 2'-OMe modified nucleotide
  modified_base 8: mod_base = OTHER; note = 2'-OMe modified nucleotide
  modified_base 10: mod_base = OTHER; note = 2'-OMe modified nucleotide
  modified_base 12: mod_base = OTHER; note = 2'-OMe modified nucleotide
  modified_base 14: mod_base = OTHER; note = 2'-OMe modified nucleotide
  modified_base 16: mod_base = OTHER; note = 2'-OMe modified nucleotide
  modified_base 18: mod_base = OTHER; note = 2'-OMe modified nucleotide
  modified_base 1: mod_base = OTHER; note = 2-deoxy-2-fluoro ribonucleotide
  modified_base 3: mod_base = OTHER; note = 2-deoxy-2-fluoro ribonucleotide
  modified_base 5: mod_base = OTHER; note = 2-deoxy-2-fluoro ribonucleotide
  modified_base 7: mod_base = OTHER; note = 2-deoxy-2-fluoro ribonucleotide
  modified_base 9: mod_base = OTHER; note = 2-deoxy-2-fluoro ribonucleotide
  modified_base 11: mod_base = OTHER; note = 2-deoxy-2-fluoro ribonucleotide
  modified_base 13: mod_base = OTHER; note = 2-deoxy-2-fluoro ribonucleotide
  modified_base 15: mod_base = OTHER; note = 2-deoxy-2-fluoro ribonucleotide
  modified_base 17: mod_base = OTHER; note = 2-deoxy-2-fluoro ribonucleotide
  modified_base 19: mod_base = OTHER; note = 2-deoxy-2-fluoro ribonucleotide
  modified_base 20: mod_base = OTHER; note = Thymine
caccagcatagtcggaccat

SEQ ID NO: 876 - RNA, 20 nt, synthetic construct
  source 1..20: mol_type = other RNA
  modified_base 20: mod_base = OTHER; note = inverted deoxyribonucleotide
  modified_base 2: mod_base = OTHER; note = 2'-OMe modified nucleotide
  modified_base 4: mod_base = OTHER; note = 2'-OMe modified nucleotide
  modified_base 6: mod_base = OTHER; note = 2'-OMe modified nucleotide
  modified_base 8: mod_base = OTHER; note = 2'-OMe modified nucleotide
  modified_base 10: mod_base = OTHER; note = 2'-OMe modified nucleotide
  modified_base 12: mod_base = OTHER; note = 2'-OMe modified nucleotide
  modified_base 14: mod_base = OTHER; note = 2'-OMe modified nucleotide
  modified_base 16: mod_base = OTHER; note = 2'-OMe modified nucleotide
  modified_base 18: mod_base = OTHER; note = 2'-OMe modified nucleotide
  modified_base 1: mod_base = OTHER; note = 2-deoxy-2-fluoro ribonucleotide
  modified_base 3: mod_base = OTHER; note = 2-deoxy-2-fluoro ribonucleotide
  modified_base 5: mod_base = OTHER; note = 2-deoxy-2-fluoro ribonucleotide
  modified_base 7: mod_base = OTHER; note = 2-deoxy-2-fluoro ribonucleotide
  modified_base 9: mod_base = OTHER; note = 2-deoxy-2-fluoro ribonucleotide
  modified_base 11: mod_base = OTHER; note = 2-deoxy-2-fluoro ribonucleotide
  modified_base 13: mod_base = OTHER; note = 2-deoxy-2-fluoro ribonucleotide
  modified_base 15: mod_base = OTHER; note = 2-deoxy-2-fluoro ribonucleotide
  modified_base 17: mod_base = OTHER; note = 2-deoxy-2-fluoro ribonucleotide
  modified_base 19: mod_base = OTHER; note = 2-deoxy-2-fluoro ribonucleotide
  modified_base 20: mod_base = OTHER; note = Thymine
atagtcggaccccagaaaat

SEQ ID NO: 877 - RNA, 20 nt, synthetic construct
  source 1..20: mol_type = other RNA
  modified_base 20: mod_base = OTHER; note = inverted deoxyribonucleotide
  modified_base 2: mod_base = OTHER; note = 2'-OMe modified nucleotide
  modified_base 4: mod_base = OTHER; note = 2'-OMe modified nucleotide
  modified_base 6: mod_base = OTHER; note = 2'-OMe modified nucleotide
  modified_base 8: mod_base = OTHER; note = 2'-OMe modified nucleotide
  modified_base 10: mod_base = OTHER; note = 2'-OMe modified nucleotide
  modified_base 12: mod_base = OTHER; note = 2'-OMe modified nucleotide
  modified_base 14: mod_base = OTHER; note = 2'-OMe modified nucleotide
  modified_base 16: mod_base = OTHER; note = 2'-OMe modified nucleotide
  modified_base 18: mod_base = OTHER; note = 2'-OMe modified nucleotide
  modified_base 1: mod_base = OTHER; note = 2-deoxy-2-fluoro ribonucleotide
  modified_base 3: mod_base = OTHER; note = 2-deoxy-2-fluoro ribonucleotide
  modified_base 5: mod_base = OTHER; note = 2-deoxy-2-fluoro ribonucleotide
  modified_base 7: mod_base = OTHER; note = 2-deoxy-2-fluoro ribonucleotide
  modified_base 9: mod_base = OTHER; note = 2-deoxy-2-fluoro ribonucleotide
  modified_base 11: mod_base = OTHER; note = 2-deoxy-2-fluoro ribonucleotide
  modified_base 13: mod_base = OTHER; note = 2-deoxy-2-fluoro ribonucleotide
  modified_base 15: mod_base = OTHER; note = 2-deoxy-2-fluoro ribonucleotide
  modified_base 17: mod_base = OTHER; note = 2-deoxy-2-fluoro ribonucleotide
  modified_base 19: mod_base = OTHER; note = 2-deoxy-2-fluoro ribonucleotide
  modified_base 20: mod_base = OTHER; note = Thymine
tagtcggaccccagaaaaat

SEQ ID NO: 878 - RNA, 20 nt, synthetic construct
  source 1..20: mol_type = other RNA
  modified_base 20: mod_base = OTHER; note = inverted deoxyribonucleotide
  modified_base 2: mod_base = OTHER; note = 2'-OMe modified nucleotide
  modified_base 4: mod_base = OTHER; note = 2'-OMe modified nucleotide
  modified_base 6: mod_base = OTHER; note = 2'-OMe modified nucleotide
  modified_base 8: mod_base = OTHER; note = 2'-OMe modified nucleotide
  modified_base 10: mod_base = OTHER; note = 2'-OMe modified nucleotide
  modified_base 12: mod_base = OTHER; note = 2'-OMe modified nucleotide
  modified_base 14: mod_base = OTHER; note = 2'-OMe modified nucleotide
  modified_base 16: mod_base = OTHER; note = 2'-OMe modified nucleotide
  modified_base 18: mod_base = OTHER; note = 2'-OMe modified nucleotide
  modified_base 1: mod_base = OTHER; note = 2-deoxy-2-fluoro ribonucleotide
  modified_base 3: mod_base = OTHER; note = 2-deoxy-2-fluoro ribonucleotide
  modified_base 5: mod_base = OTHER; note = 2-deoxy-2-fluoro ribonucleotide
  modified_base 7: mod_base = OTHER; note = 2-deoxy-2-fluoro ribonucleotide
  modified_base 9: mod_base = OTHER; note = 2-deoxy-2-fluoro ribonucleotide
  modified_base 11: mod_base = OTHER; note = 2-deoxy-2-fluoro ribonucleotide
  modified_base 13: mod_base = OTHER; note = 2-deoxy-2-fluoro ribonucleotide
  modified_base 15: mod_base = OTHER; note = 2-deoxy-2-fluoro ribonucleotide
  modified_base 17: mod_base = OTHER; note = 2-deoxy-2-fluoro ribonucleotide
  modified_base 19: mod_base = OTHER; note = 2-deoxy-2-fluoro ribonucleotide
  modified_base 20: mod_base = OTHER; note = Thymine
ccagatgctgagattcgcat

SEQ ID NO: 879 - RNA, 20 nt, synthetic construct
  source 1..20: mol_type = other RNA
  modified_base 20: mod_base = OTHER; note = inverted deoxyribonucleotide
  modified_base 2: mod_base = OTHER; note = 2'-OMe modified nucleotide
  modified_base 4: mod_base = OTHER; note = 2'-OMe modified nucleotide
  modified_base 6: mod_base = OTHER; note = 2'-OMe modified nucleotide
  modified_base 8: mod_base = OTHER; note = 2'-OMe modified nucleotide
  modified_base 10: mod_base = OTHER; note = 2'-OMe modified nucleotide
  modified_base 12: mod_base = OTHER; note = 2'-OMe modified nucleotide
  modified_base 14: mod_base = OTHER; note = 2'-OMe modified nucleotide
  modified_base 16: mod_base = OTHER; note = 2'-OMe modified nucleotide
  modified_base 18: mod_base = OTHER; note = 2'-OMe modified nucleotide
  modified_base 1: mod_base = OTHER; note = 2-deoxy-2-fluoro ribonucleotide
  modified_base 3: mod_base = OTHER; note = 2-deoxy-2-fluoro ribonucleotide
  modified_base 5: mod_base = OTHER; note = 2-deoxy-2-fluoro ribonucleotide
  modified_base 7: mod_base = OTHER; note = 2-deoxy-2-fluoro ribonucleotide
  modified_base 9: mod_base = OTHER; note = 2-deoxy-2-fluoro ribonucleotide
  modified_base 11: mod_base = OTHER; note = 2-deoxy-2-fluoro ribonucleotide
  modified_base 13: mod_base = OTHER; note = 2-deoxy-2-fluoro ribonucleotide
  modified_base 15: mod_base = OTHER; note = 2-deoxy-2-fluoro ribonucleotide
  modified_base 17: mod_base = OTHER; note = 2-deoxy-2-fluoro ribonucleotide
  modified_base 19: mod_base = OTHER; note = 2-deoxy-2-fluoro ribonucleotide
  modified_base 20: mod_base = OTHER; note = Thymine
gctgagattcgcccttggat

SEQ ID NO: 880 - RNA, 20 nt, synthetic construct
  source 1..20: mol_type = other RNA
  modified_base 20: mod_base = OTHER; note = inverted deoxyribonucleotide
  modified_base 2: mod_base = OTHER; note = 2'-OMe modified nucleotide
  modified_base 4: mod_base = OTHER; note = 2'-OMe modified nucleotide
  modified_base 6: mod_base = OTHER; note = 2'-OMe modified nucleotide
  modified_base 8: mod_base = OTHER; note = 2'-OMe modified nucleotide
  modified_base 10: mod_base = OTHER; note = 2'-OMe modified nucleotide
  modified_base 12: mod_base = OTHER; note = 2'-OMe modified nucleotide
  modified_base 14: mod_base = OTHER; note = 2'-OMe modified nucleotide
  modified_base 16: mod_base = OTHER; note = 2'-OMe modified nucleotide
  modified_base 18: mod_base = OTHER; note = 2'-OMe modified nucleotide
  modified_base 1: mod_base = OTHER; note = 2-deoxy-2-fluoro ribonucleotide
  modified_base 3: mod_base = OTHER; note = 2-deoxy-2-fluoro ribonucleotide
  modified_base 5: mod_base = OTHER; note = 2-deoxy-2-fluoro ribonucleotide
  modified_base 7: mod_base = OTHER; note = 2-deoxy-2-fluoro ribonucleotide
  modified_base 9: mod_base = OTHER; note = 2-deoxy-2-fluoro ribonucleotide
  modified_base 11: mod_base = OTHER; note = 2-deoxy-2-fluoro ribonucleotide
  modified_base 13: mod_base = OTHER; note = 2-deoxy-2-fluoro ribonucleotide
  modified_base 15: mod_base = OTHER; note = 2-deoxy-2-fluoro ribonucleotide
  modified_base 17: mod_base = OTHER; note = 2-deoxy-2-fluoro ribonucleotide
  modified_base 19: mod_base = OTHER; note = 2-deoxy-2-fluoro ribonucleotide
  modified_base 20: mod_base = OTHER; note = Thymine
ctgagattcgcccttggtat

SEQ ID NO: 881 - RNA, 20 nt, synthetic construct
  source 1..20: mol_type = other RNA
  modified_base 20: mod_base = OTHER; note = inverted deoxyribonucleotide
  modified_base 2: mod_base = OTHER; note = 2'-OMe modified nucleotide
  modified_base 4: mod_base = OTHER; note = 2'-OMe modified nucleotide
  modified_base 6: mod_base = OTHER; note = 2'-OMe modified nucleotide
  modified_base 8: mod_base = OTHER; note = 2'-OMe modified nucleotide
  modified_base 10: mod_base = OTHER; note = 2'-OMe modified nucleotide
  modified_base 12: mod_base = OTHER; note = 2'-OMe modified nucleotide
  modified_base 14: mod_base = OTHER; note = 2'-OMe modified nucleotide
  modified_base 16: mod_base = OTHER; note = 2'-OMe modified nucleotide
  modified_base 18: mod_base = OTHER; note = 2'-OMe modified nucleotide
  modified_base 1: mod_base = OTHER; note = 2-deoxy-2-fluoro ribonucleotide
  modified_base 3: mod_base = OTHER; note = 2-deoxy-2-fluoro ribonucleotide
  modified_base 5: mod_base = OTHER; note = 2-deoxy-2-fluoro ribonucleotide
  modified_base 7: mod_base = OTHER; note = 2-deoxy-2-fluoro ribonucleotide
  modified_base 9: mod_base = OTHER; note = 2-deoxy-2-fluoro ribonucleotide
  modified_base 11: mod_base = OTHER; note = 2-deoxy-2-fluoro ribonucleotide
  modified_base 13: mod_base = OTHER; note = 2-deoxy-2-fluoro ribonucleotide
  modified_base 15: mod_base = OTHER; note = 2-deoxy-2-fluoro ribonucleotide
  modified_base 17: mod_base = OTHER; note = 2-deoxy-2-fluoro ribonucleotide
  modified_base 19: mod_base = OTHER; note = 2-deoxy-2-fluoro ribonucleotide
  modified_base 20: mod_base = OTHER; note = Thymine
tgagattcgcccttggtgat

SEQ ID NO: 882 - RNA, 20 nt, synthetic construct
  source 1..20: mol_type = other RNA
  modified_base 20: mod_base = OTHER; note = inverted deoxyribonucleotide
  modified_base 2: mod_base = OTHER; note = 2'-OMe modified nucleotide
  modified_base 4: mod_base = OTHER; note = 2'-OMe modified nucleotide
  modified_base 6: mod_base = OTHER; note = 2'-OMe modified nucleotide
  modified_base 8: mod_base = OTHER; note = 2'-OMe modified nucleotide
  modified_base 10: mod_base = OTHER; note = 2'-OMe modified nucleotide
  modified_base 12: mod_base = OTHER; note = 2'-OMe modified nucleotide
  modified_base 14: mod_base = OTHER; note = 2'-OMe modified nucleotide
  modified_base 16: mod_base = OTHER; note = 2'-OMe modified nucleotide
  modified_base 18: mod_base = OTHER; note = 2'-OMe modified nucleotide
  modified_base 1: mod_base = OTHER; note = 2-deoxy-2-fluoro ribonucleotide
  modified_base 3: mod_base = OTHER; note = 2-deoxy-2-fluoro ribonucleotide
  modified_base 5: mod_base = OTHER; note = 2-deoxy-2-fluoro ribonucleotide
  modified_base 7: mod_base = OTHER; note = 2-deoxy-2-fluoro ribonucleotide
  modified_base 9: mod_base = OTHER; note = 2-deoxy-2-fluoro ribonucleotide
  modified_base 11: mod_base = OTHER; note = 2-deoxy-2-fluoro ribonucleotide
  modified_base 13: mod_base = OTHER; note = 2-deoxy-2-fluoro ribonucleotide
  modified_base 15: mod_base = OTHER; note = 2-deoxy-2-fluoro ribonucleotide
  modified_base 17: mod_base = OTHER; note = 2-deoxy-2-fluoro ribonucleotide
  modified_base 19: mod_base = OTHER; note = 2-deoxy-2-fluoro ribonucleotide
  modified_base 20: mod_base = OTHER; note = Thymine
gagattcgcccttggtgtat

SEQ ID NO: 883 - RNA, 20 nt, synthetic construct
  source 1..20: mol_type = other RNA
  modified_base 20: mod_base = OTHER; note = inverted deoxyribonucleotide
  modified_base 2: mod_base = OTHER; note = 2'-OMe modified nucleotide
  modified_base 4: mod_base = OTHER; note = 2'-OMe modified nucleotide
  modified_base 6: mod_base = OTHER; note = 2'-OMe modified nucleotide
  modified_base 8: mod_base = OTHER; note = 2'-OMe modified nucleotide
  modified_base 10: mod_base = OTHER; note = 2'-OMe modified nucleotide
  modified_base 12: mod_base = OTHER; note = 2'-OMe modified nucleotide
  modified_base 14: mod_base = OTHER; note = 2'-OMe modified nucleotide
  modified_base 16: mod_base = OTHER; note = 2'-OMe modified nucleotide
  modified_base 18: mod_base = OTHER; note = 2'-OMe modified nucleotide
  modified_base 1: mod_base = OTHER; note = 2-deoxy-2-fluoro ribonucleotide
  modified_base 3: mod_base = OTHER; note = 2-deoxy-2-fluoro ribonucleotide
  modified_base 5: mod_base = OTHER; note = 2-deoxy-2-fluoro ribonucleotide
  modified_base 7: mod_base = OTHER; note = 2-deoxy-2-fluoro ribonucleotide
  modified_base 9: mod_base = OTHER; note = 2-deoxy-2-fluoro ribonucleotide
  modified_base 11: mod_base = OTHER; note = 2-deoxy-2-fluoro ribonucleotide
  modified_base 13: mod_base = OTHER; note = 2-deoxy-2-fluoro ribonucleotide
  modified_base 15: mod_base = OTHER; note = 2-deoxy-2-fluoro ribonucleotide
  modified_base 17: mod_base = OTHER; note = 2-deoxy-2-fluoro ribonucleotide
  modified_base 19: mod_base = OTHER; note = 2-deoxy-2-fluoro ribonucleotide
  modified_base 20: mod_base = OTHER; note = Thymine
atggatcccagtgtcaggat

SEQ ID NO: 884 - RNA, 20 nt, synthetic construct
  source 1..20: mol_type = other RNA
  modified_base 20: mod_base = OTHER; note = inverted deoxyribonucleotide
  modified_base 2: mod_base = OTHER; note = 2'-OMe modified nucleotide
  modified_base 4: mod_base = OTHER; note = 2'-OMe modified nucleotide
  modified_base 6: mod_base = OTHER; note = 2'-OMe modified nucleotide
  modified_base 8: mod_base = OTHER; note = 2'-OMe modified nucleotide
  modified_base 10: mod_base = OTHER; note = 2'-OMe modified nucleotide
  modified_base 12: mod_base = OTHER; note = 2'-OMe modified nucleotide
  modified_base 14: mod_base = OTHER; note = 2'-OMe modified nucleotide
  modified_base 16: mod_base = OTHER; note = 2'-OMe modified nucleotide
  modified_base 18: mod_base = OTHER; note = 2'-OMe modified nucleotide
  modified_base 1: mod_base = OTHER; note = 2-deoxy-2-fluoro ribonucleotide
  modified_base 3: mod_base = OTHER; note = 2-deoxy-2-fluoro ribonucleotide
  modified_base 5: mod_base = OTHER; note = 2-deoxy-2-fluoro ribonucleotide
  modified_base 7: mod_base = OTHER; note = 2-deoxy-2-fluoro ribonucleotide
  modified_base 9: mod_base = OTHER; note = 2-deoxy-2-fluoro ribonucleotide
  modified_base 11: mod_base = OTHER; note = 2-deoxy-2-fluoro ribonucleotide
  modified_base 13: mod_base = OTHER; note = 2-deoxy-2-fluoro ribonucleotide
  modified_base 15: mod_base = OTHER; note = 2-deoxy-2-fluoro ribonucleotide
  modified_base 17: mod_base = OTHER; note = 2-deoxy-2-fluoro ribonucleotide
  modified_base 19: mod_base = OTHER; note = 2-deoxy-2-fluoro ribonucleotide
  modified_base 20: mod_base = OTHER; note = Thymine
gaatcaagtgtccttgcaat

SEQ ID NO: 885 - RNA, 20 nt, synthetic construct
  source 1..20: mol_type = other RNA
  modified_base 20: mod_base = OTHER; note = inverted deoxyribonucleotide
  modified_base 2: mod_base = OTHER; note = 2'-OMe modified nucleotide
  modified_base 4: mod_base = OTHER; note = 2'-OMe modified nucleotide
  modified_base 6: mod_base = OTHER; note = 2'-OMe modified nucleotide
  modified_base 8: mod_base = OTHER; note = 2'-OMe modified nucleotide
  modified_base 10: mod_base = OTHER; note = 2'-OMe modified nucleotide
  modified_base 12: mod_base = OTHER; note = 2'-OMe modified nucleotide
  modified_base 14: mod_base = OTHER; note = 2'-OMe modified nucleotide
  modified_base 16: mod_base = OTHER; note = 2'-OMe modified nucleotide
  modified_base 18: mod_base = OTHER; note = 2'-OMe modified nucleotide
  modified_base 1: mod_base = OTHER; note = 2-deoxy-2-fluoro ribonucleotide
  modified_base 3: mod_base = OTHER; note = 2-deoxy-2-fluoro ribonucleotide
  modified_base 5: mod_base = OTHER; note = 2-deoxy-2-fluoro ribonucleotide
  modified_base 7: mod_base = OTHER; note = 2-deoxy-2-fluoro ribonucleotide
  modified_base 9: mod_base = OTHER; note = 2-deoxy-2-fluoro ribonucleotide
  modified_base 11: mod_base = OTHER; note = 2-deoxy-2-fluoro ribonucleotide
  modified_base 13: mod_base = OTHER; note = 2-deoxy-2-fluoro ribonucleotide
  modified_base 15: mod_base = OTHER; note = 2-deoxy-2-fluoro ribonucleotide
  modified_base 17: mod_base = OTHER; note = 2-deoxy-2-fluoro ribonucleotide
  modified_base 19: mod_base = OTHER; note = 2-deoxy-2-fluoro ribonucleotide
  modified_base 20: mod_base = OTHER; note = Thymine
aatcaagtgtccttgcaaat

SEQ ID NO: 886 - RNA, 20 nt, synthetic construct
  source 1..20: mol_type = other RNA
  modified_base 20: mod_base = OTHER; note = inverted deoxyribonucleotide
  modified_base 2: mod_base = OTHER; note = 2'-OMe modified nucleotide
  modified_base 4: mod_base = OTHER; note = 2'-OMe modified nucleotide
  modified_base 6: mod_base = OTHER; note = 2'-OMe modified nucleotide
  modified_base 8: mod_base = OTHER; note = 2'-OMe modified nucleotide
  modified_base 10: mod_base = OTHER; note = 2'-OMe modified nucleotide
  modified_base 12: mod_base = OTHER; note = 2'-OMe modified nucleotide
  modified_base 14: mod_base = OTHER; note = 2'-OMe modified nucleotide
  modified_base 16: mod_base = OTHER; note = 2'-OMe modified nucleotide
  modified_base 18: mod_base = OTHER; note = 2'-OMe modified nucleotide
  modified_base 1: mod_base = OTHER; note = 2-deoxy-2-fluoro ribonucleotide
  modified_base 3: mod_base = OTHER; note = 2-deoxy-2-fluoro ribonucleotide
  modified_base 5: mod_base = OTHER; note = 2-deoxy-2-fluoro ribonucleotide
  modified_base 7: mod_base = OTHER; note = 2-deoxy-2-fluoro ribonucleotide
  modified_base 9: mod_base = OTHER; note = 2-deoxy-2-fluoro ribonucleotide
  modified_base 11: mod_base = OTHER; note = 2-deoxy-2-fluoro ribonucleotide
  modified_base 13: mod_base = OTHER; note = 2-deoxy-2-fluoro ribonucleotide
  modified_base 15: mod_base = OTHER; note = 2-deoxy-2-fluoro ribonucleotide
  modified_base 17: mod_base = OTHER; note = 2-deoxy-2-fluoro ribonucleotide
  modified_base 19: mod_base = OTHER; note = 2-deoxy-2-fluoro ribonucleotide
  modified_base 20: mod_base = OTHER; note = Thymine
gaagcaccaacggagcaaat

SEQ ID NO: 887 - RNA, 20 nt, synthetic construct
  source 1..20: mol_type = other RNA
  modified_base 20: mod_base = OTHER; note = inverted deoxyribonucleotide
  modified_base 2: mod_base = OTHER; note = 2'-OMe modified nucleotide
  modified_base 4: mod_base = OTHER; note = 2'-OMe modified nucleotide
  modified_base 6: mod_base = OTHER; note = 2'-OMe modified nucleotide
  modified_base 8: mod_base = OTHER; note = 2'-OMe modified nucleotide
  modified_base 10: mod_base = OTHER; note = 2'-OMe modified nucleotide
  modified_base 12: mod_base = OTHER; note = 2'-OMe modified nucleotide
  modified_base 14: mod_base = OTHER; note = 2'-OMe modified nucleotide
  modified_base 16: mod_base = OTHER; note = 2'-OMe modified nucleotide
  modified_base 18: mod_base = OTHER; note = 2'-OMe modified nucleotide
  modified_base 1: mod_base = OTHER; note = 2-deoxy-2-fluoro ribonucleotide
  modified_base 3: mod_base = OTHER; note = 2-deoxy-2-fluoro ribonucleotide
  modified_base 5: mod_base = OTHER; note = 2-deoxy-2-fluoro ribonucleotide
  modified_base 7: mod_base = OTHER; note = 2-deoxy-2-fluoro ribonucleotide
  modified_base 9: mod_base = OTHER; note = 2-deoxy-2-fluoro ribonucleotide
  modified_base 11: mod_base = OTHER; note = 2-deoxy-2-fluoro ribonucleotide
  modified_base 13: mod_base = OTHER; note = 2-deoxy-2-fluoro ribonucleotide
  modified_base 15: mod_base = OTHER; note = 2-deoxy-2-fluoro ribonucleotide
  modified_base 17: mod_base = OTHER; note = 2-deoxy-2-fluoro ribonucleotide
  modified_base 19: mod_base = OTHER; note = 2-deoxy-2-fluoro ribonucleotide
  modified_base 20: mod_base = OTHER; note = Thymine
gagttatcgaggctcattat

SEQ ID NO: 888 - RNA, 20 nt, synthetic construct
  source 1..20: mol_type = other RNA
  modified_base 20: mod_base = OTHER; note = inverted deoxyribonucleotide
  modified_base 2: mod_base = OTHER; note = 2'-OMe modified nucleotide
  modified_base 4: mod_base = OTHER; note = 2'-OMe modified nucleotide
  modified_base 6: mod_base = OTHER; note = 2'-OMe modified nucleotide
  modified_base 8: mod_base = OTHER; note = 2'-OMe modified nucleotide
  modified_base 10: mod_base = OTHER; note = 2'-OMe modified nucleotide
  modified_base 12: mod_base = OTHER; note = 2'-OMe modified nucleotide
  modified_base 14: mod_base = OTHER; note = 2'-OMe modified nucleotide
  modified_base 16: mod_base = OTHER; note = 2'-OMe modified nucleotide
  modified_base 18: mod_base = OTHER; note = 2'-OMe modified nucleotide
  modified_base 1: mod_base = OTHER; note = 2-deoxy-2-fluoro ribonucleotide
  modified_base 3: mod_base = OTHER; note = 2-deoxy-2-fluoro ribonucleotide
  modified_base 5: mod_base = OTHER; note = 2-deoxy-2-fluoro ribonucleotide
  modified_base 7: mod_base = OTHER; note = 2-deoxy-2-fluoro ribonucleotide
  modified_base 9: mod_base = OTHER; note = 2-deoxy-2-fluoro ribonucleotide
  modified_base 11: mod_base = OTHER; note = 2-deoxy-2-fluoro ribonucleotide
  modified_base 13: mod_base = OTHER; note = 2-deoxy-2-fluoro ribonucleotide
  modified_base 15: mod_base = OTHER; note = 2-deoxy-2-fluoro ribonucleotide
  modified_base 17: mod_base = OTHER; note = 2-deoxy-2-fluoro ribonucleotide
  modified_base 19: mod_base = OTHER; note = 2-deoxy-2-fluoro ribonucleotide
  modified_base 20: mod_base = OTHER; note = Thymine
agttatcgaggctcattcat

SEQ ID NO: 889 - RNA, 20 nt, synthetic construct
  source 1..20: mol_type = other RNA
  modified_base 20: mod_base = OTHER; note = inverted deoxyribonucleotide
  modified_base 2: mod_base = OTHER; note = 2'-OMe modified nucleotide
  modified_base 4: mod_base = OTHER; note = 2'-OMe modified nucleotide
  modified_base 6: mod_base = OTHER; note = 2'-OMe modified nucleotide
  modified_base 8: mod_base = OTHER; note = 2'-OMe modified nucleotide
  modified_base 10: mod_base = OTHER; note = 2'-OMe modified nucleotide
  modified_base 12: mod_base = OTHER; note = 2'-OMe modified nucleotide
  modified_base 14: mod_base = OTHER; note = 2'-OMe modified nucleotide
  modified_base 16: mod_base = OTHER; note = 2'-OMe modified nucleotide
  modified_base 18: mod_base = OTHER; note = 2'-OMe modified nucleotide
  modified_base 1: mod_base = OTHER; note = 2-deoxy-2-fluoro ribonucleotide
  modified_base 3: mod_base = OTHER; note = 2-deoxy-2-fluoro ribonucleotide
  modified_base 5: mod_base = OTHER; note = 2-deoxy-2-fluoro ribonucleotide
  modified_base 7: mod_base = OTHER; note = 2-deoxy-2-fluoro ribonucleotide
  modified_base 9: mod_base = OTHER; note = 2-deoxy-2-fluoro ribonucleotide
  modified_base 11: mod_base = OTHER; note = 2-deoxy-2-fluoro ribonucleotide
  modified_base 13: mod_base = OTHER; note = 2-deoxy-2-fluoro ribonucleotide
  modified_base 15: mod_base = OTHER; note = 2-deoxy-2-fluoro ribonucleotide
  modified_base 17: mod_base = OTHER; note = 2-deoxy-2-fluoro ribonucleotide
  modified_base 19: mod_base = OTHER; note = 2-deoxy-2-fluoro ribonucleotide
  modified_base 20: mod_base = OTHER; note = Thymine
gacaacagaatattatccat

SEQ ID NO: 890 - RNA, 20 nt, synthetic construct
  source 1..20: mol_type = other RNA
  modified_base 20: mod_base = OTHER; note = inverted deoxyribonucleotide
  modified_base 2: mod_base = OTHER; note = 2'-OMe modified nucleotide
  modified_base 4: mod_base = OTHER; note = 2'-OMe modified nucleotide
  modified_base 6: mod_base = OTHER; note = 2'-OMe modified nucleotide
  modified_base 8: mod_base = OTHER; note = 2'-OMe modified nucleotide
  modified_base 10: mod_base = OTHER; note = 2'-OMe modified nucleotide
  modified_base 12: mod_base = OTHER; note = 2'-OMe modified nucleotide
  modified_base 14: mod_base = OTHER; note = 2'-OMe modified nucleotide
  modified_base 16: mod_base = OTHER; note = 2'-OMe modified nucleotide
  modified_base 18: mod_base = OTHER; note = 2'-OMe modified nucleotide
  modified_base 1: mod_base = OTHER; note = 2-deoxy-2-fluoro ribonucleotide
  modified_base 3: mod_base = OTHER; note = 2-deoxy-2-fluoro ribonucleotide
  modified_base 5: mod_base = OTHER; note = 2-deoxy-2-fluoro ribonucleotide
  modified_base 7: mod_base = OTHER; note = 2-deoxy-2-fluoro ribonucleotide
  modified_base 9: mod_base = OTHER; note = 2-deoxy-2-fluoro ribonucleotide
  modified_base 11: mod_base = OTHER; note = 2-deoxy-2-fluoro ribonucleotide
  modified_base 13: mod_base = OTHER; note = 2-deoxy-2-fluoro ribonucleotide
  modified_base 15: mod_base = OTHER; note = 2-deoxy-2-fluoro ribonucleotide
  modified_base 17: mod_base = OTHER; note = 2-deoxy-2-fluoro ribonucleotide
  modified_base 19: mod_base = OTHER; note = 2-deoxy-2-fluoro ribonucleotide
  modified_base 20: mod_base = OTHER; note = Thymine
cttggtgttataccatggat

SEQ ID NO: 891 - RNA, 20 nt, synthetic construct
  source 1..20: mol_type = other RNA
  modified_base 20: mod_base = OTHER; note = inverted deoxyribonucleotide
  modified_base 2: mod_base = OTHER; note = 2'-OMe modified nucleotide
  modified_base 4: mod_base = OTHER; note = 2'-OMe modified nucleotide
  modified_base 6: mod_base = OTHER; note = 2'-OMe modified nucleotide
  modified_base 8: mod_base = OTHER; note = 2'-OMe modified nucleotide
  modified_base 10: mod_base = OTHER; note = 2'-OMe modified nucleotide
  modified_base 12: mod_base = OTHER; note = 2'-OMe modified nucleotide
  modified_base 14: mod_base = OTHER; note = 2'-OMe modified nucleotide
  modified_base 16: mod_base = OTHER; note = 2'-OMe modified nucleotide
  modified_base 18: mod_base = OTHER; note = 2'-OMe modified nucleotide
  modified_base 1: mod_base = OTHER; note = 2-deoxy-2-fluoro ribonucleotide
  modified_base 3: mod_base = OTHER; note = 2-deoxy-2-fluoro ribonucleotide
  modified_base 5: mod_base = OTHER; note = 2-deoxy-2-fluoro ribonucleotide
  modified_base 7: mod_base = OTHER; note = 2-deoxy-2-fluoro ribonucleotide
  modified_base 9: mod_base = OTHER; note = 2-deoxy-2-fluoro ribonucleotide
  modified_base 11: mod_base = OTHER; note = 2-deoxy-2-fluoro ribonucleotide
  modified_base 13: mod_base = OTHER; note = 2-deoxy-2-fluoro ribonucleotide
  modified_base 15: mod_base = OTHER; note = 2-deoxy-2-fluoro ribonucleotide
  modified_base 17: mod_base = OTHER; note = 2-deoxy-2-fluoro ribonucleotide
  modified_base 19: mod_base = OTHER; note = 2-deoxy-2-fluoro ribonucleotide
  modified_base 20: mod_base = OTHER; note = Thymine
ggtgttataccatggatcat

SEQ ID NO: 892 - RNA, 20 nt, synthetic construct
  source 1..20: mol_type = other RNA
  modified_base 20: mod_base = OTHER; note = inverted deoxyribonucleotide
  modified_base 2: mod_base = OTHER; note = 2'-OMe modified nucleotide
  modified_base 4: mod_base = OTHER; note = 2'-OMe modified nucleotide
  modified_base 6: mod_base = OTHER; note = 2'-OMe modified nucleotide
  modified_base 8: mod_base = OTHER; note = 2'-OMe modified nucleotide
  modified_base 10: mod_base = OTHER; note = 2'-OMe modified nucleotide
  modified_base 12: mod_base = OTHER; note = 2'-OMe modified nucleotide
  modified_base 14: mod_base = OTHER; note = 2'-OMe modified nucleotide
  modified_base 16: mod_base = OTHER; note = 2'-OMe modified nucleotide
  modified_base 18: mod_base = OTHER; note = 2'-OMe modified nucleotide
  modified_base 1: mod_base = OTHER; note = 2-deoxy-2-fluoro ribonucleotide
  modified_base 3: mod_base = OTHER; note = 2-deoxy-2-fluoro ribonucleotide
  modified_base 5: mod_base = OTHER; note = 2-deoxy-2-fluoro ribonucleotide
  modified_base 7: mod_base = OTHER; note = 2-deoxy-2-fluoro ribonucleotide
  modified_base 9: mod_base = OTHER; note = 2-deoxy-2-fluoro ribonucleotide
  modified_base 11: mod_base = OTHER; note = 2-deoxy-2-fluoro ribonucleotide
  modified_base 13: mod_base = OTHER; note = 2-deoxy-2-fluoro ribonucleotide
  modified_base 15: mod_base = OTHER; note = 2-deoxy-2-fluoro ribonucleotide
  modified_base 17: mod_base = OTHER; note = 2-deoxy-2-fluoro ribonucleotide
  modified_base 19: mod_base = OTHER; note = 2-deoxy-2-fluoro ribonucleotide
  modified_base 20: mod_base = OTHER; note = Thymine
tataccatggatcccaatat

SEQ ID NO: 893 - RNA, 20 nt, synthetic construct
  source 1..20: mol_type = other RNA
  modified_base 20: mod_base = OTHER; note = inverted deoxyribonucleotide
  modified_base 2: mod_base = OTHER; note = 2'-OMe modified nucleotide
  modified_base 4: mod_base = OTHER; note = 2'-OMe modified nucleotide
  modified_base 6: mod_base = OTHER; note = 2'-OMe modified nucleotide
  modified_base 8: mod_base = OTHER; note = 2'-OMe modified nucleotide
  modified_base 10: mod_base = OTHER; note = 2'-OMe modified nucleotide
  modified_base 12: mod_base = OTHER; note = 2'-OMe modified nucleotide
  modified_base 14: mod_base = OTHER; note = 2'-OMe modified nucleotide
  modified_base 16: mod_base = OTHER; note = 2'-OMe modified nucleotide
  modified_base 18: mod_base = OTHER; note = 2'-OMe modified nucleotide
  modified_base 1: mod_base = OTHER; note = 2-deoxy-2-fluoro ribonucleotide
  modified_base 3: mod_base = OTHER; note = 2-deoxy-2-fluoro ribonucleotide
  modified_base 5: mod_base = OTHER; note = 2-deoxy-2-fluoro ribonucleotide
  modified_base 7: mod_base = OTHER; note = 2-deoxy-2-fluoro ribonucleotide
  modified_base 9: mod_base = OTHER; note = 2-deoxy-2-fluoro ribonucleotide
  modified_base 11: mod_base = OTHER; note = 2-deoxy-2-fluoro ribonucleotide
  modified_base 13: mod_base = OTHER; note = 2-deoxy-2-fluoro ribonucleotide
  modified_base 15: mod_base = OTHER; note = 2-deoxy-2-fluoro ribonucleotide
  modified_base 17: mod_base = OTHER; note = 2-deoxy-2-fluoro ribonucleotide
  modified_base 19: mod_base = OTHER; note = 2-deoxy-2-fluoro ribonucleotide
  modified_base 20: mod_base = OTHER; note = Thymine
ataccatggatcccaatgat

SEQ ID NO: 894 - RNA, 20 nt, synthetic construct
  source 1..20: mol_type = other RNA
  modified_base 20: mod_base = OTHER; note = inverted deoxyribonucleotide
  modified_base 2: mod_base = OTHER; note = 2'-OMe modified nucleotide
  modified_base 4: mod_base = OTHER; note = 2'-OMe modified nucleotide
  modified_base 6: mod_base = OTHER; note = 2'-OMe modified nucleotide
  modified_base 8: mod_base = OTHER; note = 2'-OMe modified nucleotide
  modified_base 10: mod_base = OTHER; note = 2'-OMe modified nucleotide
  modified_base 12: mod_base = OTHER; note = 2'-OMe modified nucleotide
  modified_base 14: mod_base = OTHER; note = 2'-OMe modified nucleotide
  modified_base 16: mod_base = OTHER; note = 2'-OMe modified nucleotide
  modified_base 18: mod_base = OTHER; note = 2'-OMe modified nucleotide
  modified_base 1: mod_base = OTHER; note = 2-deoxy-2-fluoro ribonucleotide
  modified_base 3: mod_base = OTHER; note = 2-deoxy-2-fluoro ribonucleotide
  modified_base 5: mod_base = OTHER; note = 2-deoxy-2-fluoro ribonucleotide
  modified_base 7: mod_base = OTHER; note = 2-deoxy-2-fluoro ribonucleotide
  modified_base 9: mod_base = OTHER; note = 2-deoxy-2-fluoro ribonucleotide
  modified_base 11: mod_base = OTHER; note = 2-deoxy-2-fluoro ribonucleotide
  modified_base 13: mod_base = OTHER; note = 2-deoxy-2-fluoro ribonucleotide
  modified_base 15: mod_base = OTHER; note = 2-deoxy-2-fluoro ribonucleotide
  modified_base 17: mod_base = OTHER; note = 2-deoxy-2-fluoro ribonucleotide
  modified_base 19: mod_base = OTHER; note = 2-deoxy-2-fluoro ribonucleotide
  modified_base 20: mod_base = OTHER; note = Thymine
taccatggatcccaatgtat

SEQ ID NO: 895 - RNA, 20 nt, synthetic construct
  source 1..20: mol_type = other RNA
  modified_base 20: mod_base = OTHER; note = inverted deoxyribonucleotide
  modified_base 2: mod_base = OTHER; note = 2'-OMe modified nucleotide
  modified_base 4: mod_base = OTHER; note = 2'-OMe modified nucleotide
  modified_base 6: mod_base = OTHER; note = 2'-OMe modified nucleotide
  modified_base 8: mod_base = OTHER; note = 2'-OMe modified nucleotide
  modified_base 10: mod_base = OTHER; note = 2'-OMe modified nucleotide
  modified_base 12: mod_base = OTHER; note = 2'-OMe modified nucleotide
  modified_base 14: mod_base = OTHER; note = 2'-OMe modified nucleotide
  modified_base 16: mod_base = OTHER; note = 2'-OMe modified nucleotide
  modified_base 18: mod_base = OTHER; note = 2'-OMe modified nucleotide
  modified_base 1: mod_base = OTHER; note = 2-deoxy-2-fluoro ribonucleotide
  modified_base 3: mod_base = OTHER; note = 2-deoxy-2-fluoro ribonucleotide
  modified_base 5: mod_base = OTHER; note = 2-deoxy-2-fluoro ribonucleotide
  modified_base 7: mod_base = OTHER; note = 2-deoxy-2-fluoro ribonucleotide
  modified_base 9: mod_base = OTHER; note = 2-deoxy-2-fluoro ribonucleotide
  modified_base 11: mod_base = OTHER; note = 2-deoxy-2-fluoro ribonucleotide
  modified_base 13: mod_base = OTHER; note = 2-deoxy-2-fluoro ribonucleotide
  modified_base 15: mod_base = OTHER; note = 2-deoxy-2-fluoro ribonucleotide
  modified_base 17: mod_base = OTHER; note = 2-deoxy-2-fluoro ribonucleotide
  modified_base 19: mod_base = OTHER; note = 2-deoxy-2-fluoro ribonucleotide
  modified_base 20: mod_base = OTHER; note = Thymine
accatggatcccaatgtcat

SEQ ID NO: 896 - RNA, 20 nt, synthetic construct
  source 1..20: mol_type = other RNA
  modified_base 20: mod_base = OTHER; note = inverted deoxyribonucleotide
  modified_base 2: mod_base = OTHER; note = 2'-OMe modified nucleotide
  modified_base 4: mod_base = OTHER; note = 2'-OMe modified nucleotide
  modified_base 6: mod_base = OTHER; note = 2'-OMe modified nucleotide
  modified_base 8: mod_base = OTHER; note = 2'-OMe modified nucleotide
  modified_base 10: mod_base = OTHER; note = 2'-OMe modified nucleotide
  modified_base 12: mod_base = OTHER; note = 2'-OMe modified nucleotide
  modified_base 14: mod_base = OTHER; note = 2'-OMe modified nucleotide
  modified_base 16: mod_base = OTHER; note = 2'-OMe modified nucleotide
  modified_base 18: mod_base = OTHER; note = 2'-OMe modified nucleotide
  modified_base 1: mod_base = OTHER; note = 2-deoxy-2-fluoro ribonucleotide
  modified_base 3: mod_base = OTHER; note = 2-deoxy-2-fluoro ribonucleotide
  modified_base 5: mod_base = OTHER; note = 2-deoxy-2-fluoro ribonucleotide
  modified_base 7: mod_base = OTHER; note = 2-deoxy-2-fluoro ribonucleotide
  modified_base 9: mod_base = OTHER; note = 2-deoxy-2-fluoro ribonucleotide
  modified_base 11: mod_base = OTHER; note = 2-deoxy-2-fluoro ribonucleotide
  modified_base 13: mod_base = OTHER; note = 2-deoxy-2-fluoro ribonucleotide
  modified_base 15: mod_base = OTHER; note = 2-deoxy-2-fluoro ribonucleotide
  modified_base 17: mod_base = OTHER; note = 2-deoxy-2-fluoro ribonucleotide
  modified_base 19: mod_base = OTHER; note = 2-deoxy-2-fluoro ribonucleotide
  modified_base 20: mod_base = OTHER; note = Thymine
gcaacctgacacaatgtcat

SEQ ID NO: 897 - RNA, 20 nt, synthetic construct
  source 1..20: mol_type = other RNA
  modified_base 20: mod_base = OTHER; note = inverted deoxyribonucleotide
  modified_base 2: mod_base = OTHER; note = 2'-OMe modified nucleotide
  modified_base 4: mod_base = OTHER; note = 2'-OMe modified nucleotide
  modified_base 6: mod_base = OTHER; note = 2'-OMe modified nucleotide
  modified_base 8: mod_base = OTHER; note = 2'-OMe modified nucleotide
  modified_base 10: mod_base = OTHER; note = 2'-OMe modified nucleotide
  modified_base 12: mod_base = OTHER; note = 2'-OMe modified nucleotide
  modified_base 14: mod_base = OTHER; note = 2'-OMe modified nucleotide
  modified_base 16: mod_base = OTHER; note = 2'-OMe modified nucleotide
  modified_base 18: mod_base = OTHER; note = 2'-OMe modified nucleotide
  modified_base 1: mod_base = OTHER; note = 2-deoxy-2-fluoro ribonucleotide
  modified_base 3: mod_base = OTHER; note = 2-deoxy-2-fluoro ribonucleotide
  modified_base 5: mod_base = OTHER; note = 2-deoxy-2-fluoro ribonucleotide
  modified_base 7: mod_base = OTHER; note = 2-deoxy-2-fluoro ribonucleotide
  modified_base 9: mod_base = OTHER; note = 2-deoxy-2-fluoro ribonucleotide
  modified_base 11: mod_base = OTHER; note = 2-deoxy-2-fluoro ribonucleotide
  modified_base 13: mod_base = OTHER; note = 2-deoxy-2-fluoro ribonucleotide
  modified_base 15: mod_base = OTHER; note = 2-deoxy-2-fluoro ribonucleotide
  modified_base 17: mod_base = OTHER; note = 2-deoxy-2-fluoro ribonucleotide
  modified_base 19: mod_base = OTHER; note = 2-deoxy-2-fluoro ribonucleotide
  modified_base 20: mod_base = OTHER; note = Thymine
ctgacacaatgtccagtgat

SEQ ID NO: 898 - RNA, 20 nt, synthetic construct
  source 1..20: mol_type = other RNA
  modified_base 20: mod_base = OTHER; note = inverted deoxyribonucleotide
  modified_base 2: mod_base = OTHER; note = 2'-OMe modified nucleotide
  modified_base 4: mod_base = OTHER; note = 2'-OMe modified nucleotide
  modified_base 6: mod_base = OTHER; note = 2'-OMe modified nucleotide
  modified_base 8: mod_base = OTHER; note = 2'-OMe modified nucleotide
  modified_base 10: mod_base = OTHER; note = 2'-OMe modified nucleotide
  modified_base 12: mod_base = OTHER; note = 2'-OMe modified nucleotide
  modified_base 14: mod_base = OTHER; note = 2'-OMe modified nucleotide
  modified_base 16: mod_base = OTHER; note = 2'-OMe modified nucleotide
  modified_base 18: mod_base = OTHER; note = 2'-OMe modified nucleotide
  modified_base 1: mod_base = OTHER; note = 2-deoxy-2-fluoro ribonucleotide
  modified_base 3: mod_base = OTHER; note = 2-deoxy-2-fluoro ribonucleotide
  modified_base 5: mod_base = OTHER; note = 2-deoxy-2-fluoro ribonucleotide
  modified_base 7: mod_base = OTHER; note = 2-deoxy-2-fluoro ribonucleotide
  modified_base 9: mod_base = OTHER; note = 2-deoxy-2-fluoro ribonucleotide
  modified_base 11: mod_base = OTHER; note = 2-deoxy-2-fluoro ribonucleotide
  modified_base 13: mod_base = OTHER; note = 2-deoxy-2-fluoro ribonucleotide
  modified_base 15: mod_base = OTHER; note = 2-deoxy-2-fluoro ribonucleotide
  modified_base 17: mod_base = OTHER; note = 2-deoxy-2-fluoro ribonucleotide
  modified_base 19: mod_base = OTHER; note = 2-deoxy-2-fluoro ribonucleotide
  modified_base 20: mod_base = OTHER; note = Thymine
ccagtgacagaatcaagtat

SEQ ID NO: 899 - RNA, 20 nt, synthetic construct
  source 1..20: mol_type = other RNA
  modified_base 20: mod_base = OTHER; note = inverted deoxyribonucleotide
  modified_base 2: mod_base = OTHER; note = 2'-OMe modified nucleotide
  modified_base 4: mod_base = OTHER; note = 2'-OMe modified nucleotide
  modified_base 6: mod_base = OTHER; note = 2'-OMe modified nucleotide
  modified_base 8: mod_base = OTHER; note = 2'-OMe modified nucleotide
  modified_base 10: mod_base = OTHER; note = 2'-OMe modified nucleotide
  modified_base 12: mod_base = OTHER; note = 2'-OMe modified nucleotide
  modified_base 14: mod_base = OTHER; note = 2'-OMe modified nucleotide
  modified_base 16: mod_base = OTHER; note = 2'-OMe modified nucleotide
  modified_base 18: mod_base = OTHER; note = 2'-OMe modified nucleotide
  modified_base 1: mod_base = OTHER; note = 2-deoxy-2-fluoro ribonucleotide
  modified_base 3: mod_base = OTHER; note = 2-deoxy-2-fluoro ribonucleotide
  modified_base 5: mod_base = OTHER; note = 2-deoxy-2-fluoro ribonucleotide
  modified_base 7: mod_base = OTHER; note = 2-deoxy-2-fluoro ribonucleotide
  modified_base 9: mod_base = OTHER; note = 2-deoxy-2-fluoro ribonucleotide
  modified_base 11: mod_base = OTHER; note = 2-deoxy-2-fluoro ribonucleotide
  modified_base 13: mod_base = OTHER; note = 2-deoxy-2-fluoro ribonucleotide
  modified_base 15: mod_base = OTHER; note = 2-deoxy-2-fluoro ribonucleotide
  modified_base 17: mod_base = OTHER; note = 2-deoxy-2-fluoro ribonucleotide
  modified_base 19: mod_base = OTHER; note = 2-deoxy-2-fluoro ribonucleotide
  modified_base 20: mod_base = OTHER; note = Thymine
ttatcgaggctcattctcat

SEQ ID NO: 900 - RNA, 20 nt, synthetic construct
  source 1..20: mol_type = other RNA
  modified_base 20: mod_base = OTHER; note = inverted deoxyribonucleotide
  modified_base 2: mod_base = OTHER; note = 2'-OMe modified nucleotide
  modified_base 4: mod_base = OTHER; note = 2'-OMe modified nucleotide
  modified_base 6: mod_base = OTHER; note = 2'-OMe modified nucleotide
  modified_base 8: mod_base = OTHER; note = 2'-OMe modified nucleotide
  modified_base 10: mod_base = OTHER; note = 2'-OMe modified nucleotide
  modified_base 12: mod_base = OTHER; note = 2'-OMe modified nucleotide
  modified_base 14: mod_base = OTHER; note = 2'-OMe modified nucleotide
  modified_base 16: mod_base = OTHER; note = 2'-OMe modified nucleotide
  modified_base 18: mod_base = OTHER; note = 2'-OMe modified nucleotide
  modified_base 1: mod_base = OTHER; note = 2-deoxy-2-fluoro ribonucleotide
  modified_base 3: mod_base = OTHER; note = 2-deoxy-2-fluoro ribonucleotide
  modified_base 5: mod_base = OTHER; note = 2-deoxy-2-fluoro ribonucleotide
  modified_base 7: mod_base = OTHER; note = 2-deoxy-2-fluoro ribonucleotide
  modified_base 9: mod_base = OTHER; note = 2-deoxy-2-fluoro ribonucleotide
  modified_base 11: mod_base = OTHER; note = 2-deoxy-2-fluoro ribonucleotide
  modified_base 13: mod_base = OTHER; note = 2-deoxy-2-fluoro ribonucleotide
  modified_base 15: mod_base = OTHER; note = 2-deoxy-2-fluoro ribonucleotide
  modified_base 17: mod_base = OTHER; note = 2-deoxy-2-fluoro ribonucleotide
  modified_base 19: mod_base = OTHER; note = 2-deoxy-2-fluoro ribonucleotide
  modified_base 20: mod_base = OTHER; note = Thymine
agaatactacccaaatggat

SEQ ID NO: 901 - RNA, 20 nt, synthetic construct
  source 1..20: mol_type = other RNA
  modified_base 20: mod_base = OTHER; note = inverted deoxyribonucleotide
  modified_base 2: mod_base = OTHER; note = 2'-OMe modified nucleotide
  modified_base 4: mod_base = OTHER; note = 2'-OMe modified nucleotide
  modified_base 6: mod_base = OTHER; note = 2'-OMe modified nucleotide
  modified_base 8: mod_base = OTHER; note = 2'-OMe modified nucleotide
  modified_base 10: mod_base = OTHER; note = 2'-OMe modified nucleotide
  modified_base 12: mod_base = OTHER; note = 2'-OMe modified nucleotide
  modified_base 14: mod_base = OTHER; note = 2'-OMe modified nucleotide
  modified_base 16: mod_base = OTHER; note = 2'-OMe modified nucleotide
  modified_base 18: mod_base = OTHER; note = 2'-OMe modified nucleotide
  modified_base 1: mod_base = OTHER; note = 2-deoxy-2-fluoro ribonucleotide
  modified_base 3: mod_base = OTHER; note = 2-deoxy-2-fluoro ribonucleotide
  modified_base 5: mod_base = OTHER; note = 2-deoxy-2-fluoro ribonucleotide
  modified_base 7: mod_base = OTHER; note = 2-deoxy-2-fluoro ribonucleotide
  modified_base 9: mod_base = OTHER; note = 2-deoxy-2-fluoro ribonucleotide
  modified_base 11: mod_base = OTHER; note = 2-deoxy-2-fluoro ribonucleotide
  modified_base 13: mod_base = OTHER; note = 2-deoxy-2-fluoro ribonucleotide
  modified_base 15: mod_base = OTHER; note = 2-deoxy-2-fluoro ribonucleotide
  modified_base 17: mod_base = OTHER; note = 2-deoxy-2-fluoro ribonucleotide
  modified_base 19: mod_base = OTHER; note = 2-deoxy-2-fluoro ribonucleotide
  modified_base 20: mod_base = OTHER; note = Thymine
aatactacccaaatggtgat

SEQ ID NO: 902 - RNA, 20 nt, synthetic construct
  source 1..20: mol_type = other RNA
  modified_base 20: mod_base = OTHER; note = inverted deoxyribonucleotide
  modified_base 2: mod_base = OTHER; note = 2'-OMe modified nucleotide
  modified_base 4: mod_base = OTHER; note = 2'-OMe modified nucleotide
  modified_base 6: mod_base = OTHER; note = 2'-OMe modified nucleotide
  modified_base 8: mod_base = OTHER; note = 2'-OMe modified nucleotide
  modified_base 10: mod_base = OTHER; note = 2'-OMe modified nucleotide
  modified_base 12: mod_base = OTHER; note = 2'-OMe modified nucleotide
  modified_base 14: mod_base = OTHER; note = 2'-OMe modified nucleotide
  modified_base 16: mod_base = OTHER; note = 2'-OMe modified nucleotide
  modified_base 18: mod_base = OTHER; note = 2'-OMe modified nucleotide
  modified_base 1: mod_base = OTHER; note = 2-deoxy-2-fluoro ribonucleotide
  modified_base 3: mod_base = OTHER; note = 2-deoxy-2-fluoro ribonucleotide
  modified_base 5: mod_base = OTHER; note = 2-deoxy-2-fluoro ribonucleotide
  modified_base 7: mod_base = OTHER; note = 2-deoxy-2-fluoro ribonucleotide
  modified_base 9: mod_base = OTHER; note = 2-deoxy-2-fluoro ribonucleotide
  modified_base 11: mod_base = OTHER; note = 2-deoxy-2-fluoro ribonucleotide
  modified_base 13: mod_base = OTHER; note = 2-deoxy-2-fluoro ribonucleotide
  modified_base 15: mod_base = OTHER; note = 2-deoxy-2-fluoro ribonucleotide
  modified_base 17: mod_base = OTHER; note = 2-deoxy-2-fluoro ribonucleotide
  modified_base 19: mod_base = OTHER; note = 2-deoxy-2-fluoro ribonucleotide
  modified_base 20: mod_base = OTHER; note = Thymine
atactacccaaatggtggat

SEQ ID NO: 903 - RNA, 20 nt, synthetic construct
  source 1..20: mol_type = other RNA
  modified_base 20: mod_base = OTHER; note = inverted deoxyribonucleotide
  modified_base 2: mod_base = OTHER; note = 2'-OMe modified nucleotide
  modified_base 4: mod_base = OTHER; note = 2'-OMe modified nucleotide
  modified_base 6: mod_base = OTHER; note = 2'-OMe modified nucleotide
  modified_base 8: mod_base = OTHER; note = 2'-OMe modified nucleotide
  modified_base 10: mod_base = OTHER; note = 2'-OMe modified nucleotide
  modified_base 12: mod_base = OTHER; note = 2'-OMe modified nucleotide
  modified_base 14: mod_base = OTHER; note = 2'-OMe modified nucleotide
  modified_base 16: mod_base = OTHER; note = 2'-OMe modified nucleotide
  modified_base 18: mod_base = OTHER; note = 2'-OMe modified nucleotide
  modified_base 1: mod_base = OTHER; note = 2-deoxy-2-fluoro ribonucleotide
  modified_base 3: mod_base = OTHER; note = 2-deoxy-2-fluoro ribonucleotide
  modified_base 5: mod_base = OTHER; note = 2-deoxy-2-fluoro ribonucleotide
  modified_base 7: mod_base = OTHER; note = 2-deoxy-2-fluoro ribonucleotide
  modified_base 9: mod_base = OTHER; note = 2-deoxy-2-fluoro ribonucleotide
  modified_base 11: mod_base = OTHER; note = 2-deoxy-2-fluoro ribonucleotide
  modified_base 13: mod_base = OTHER; note = 2-deoxy-2-fluoro ribonucleotide
  modified_base 15: mod_base = OTHER; note = 2-deoxy-2-fluoro ribonucleotide
  modified_base 17: mod_base = OTHER; note = 2-deoxy-2-fluoro ribonucleotide
  modified_base 19: mod_base = OTHER; note = 2-deoxy-2-fluoro ribonucleotide
  modified_base 20: mod_base = OTHER; note = Thymine
attcgcccttggtgttatat

SEQ ID NO: 904 - RNA, 20 nt, synthetic construct
  source 1..20: mol_type = other RNA
  modified_base 20: mod_base = OTHER; note = inverted deoxyribonucleotide
  modified_base 2: mod_base = OTHER; note = 2'-OMe modified nucleotide
  modified_base 4: mod_base = OTHER; note = 2'-OMe modified nucleotide
  modified_base 6: mod_base = OTHER; note = 2'-OMe modified nucleotide
  modified_base 8: mod_base = OTHER; note = 2'-OMe modified nucleotide
  modified_base 10: mod_base = OTHER; note = 2'-OMe modified nucleotide
  modified_base 12: mod_base = OTHER; note = 2'-OMe modified nucleotide
  modified_base 14: mod_base = OTHER; note = 2'-OMe modified nucleotide
  modified_base 16: mod_base = OTHER; note = 2'-OMe modified nucleotide
  modified_base 18: mod_base = OTHER; note = 2'-OMe modified nucleotide
  modified_base 1: mod_base = OTHER; note = 2-deoxy-2-fluoro ribonucleotide
  modified_base 3: mod_base = OTHER; note = 2-deoxy-2-fluoro ribonucleotide
  modified_base 5: mod_base = OTHER; note = 2-deoxy-2-fluoro ribonucleotide
  modified_base 7: mod_base = OTHER; note = 2-deoxy-2-fluoro ribonucleotide
  modified_base 9: mod_base = OTHER; note = 2-deoxy-2-fluoro ribonucleotide
  modified_base 11: mod_base = OTHER; note = 2-deoxy-2-fluoro ribonucleotide
  modified_base 13: mod_base = OTHER; note = 2-deoxy-2-fluoro ribonucleotide
  modified_base 15: mod_base = OTHER; note = 2-deoxy-2-fluoro ribonucleotide
  modified_base 17: mod_base = OTHER; note = 2-deoxy-2-fluoro ribonucleotide
  modified_base 19: mod_base = OTHER; note = 2-deoxy-2-fluoro ribonucleotide
  modified_base 20: mod_base = OTHER; note = Thymine
tataccatggatcccagtat

SEQ ID NO: 905 - RNA, 20 nt, synthetic construct
  source 1..20: mol_type = other RNA
  modified_base 20: mod_base = OTHER; note = inverted deoxyribonucleotide
  modified_base 2: mod_base = OTHER; note = 2'-OMe modified nucleotide
  modified_base 4: mod_base = OTHER; note = 2'-OMe modified nucleotide
  modified_base 6: mod_base = OTHER; note = 2'-OMe modified nucleotide
  modified_base 8: mod_base = OTHER; note = 2'-OMe modified nucleotide
  modified_base 10: mod_base = OTHER; note = 2'-OMe modified nucleotide
  modified_base 12: mod_base = OTHER; note = 2'-OMe modified nucleotide
  modified_base 14: mod_base = OTHER; note = 2'-OMe modified nucleotide
  modified_base 16: mod_base = OTHER; note = 2'-OMe modified nucleotide
  modified_base 18: mod_base = OTHER; note = 2'-OMe modified nucleotide
  modified_base 1: mod_base = OTHER; note = 2-deoxy-2-fluoro ribonucleotide
  modified_base 3: mod_base = OTHER; note = 2-deoxy-2-fluoro ribonucleotide
  modified_base 5: mod_base = OTHER; note = 2-deoxy-2-fluoro ribonucleotide
  modified_base 7: mod_base = OTHER; note = 2-deoxy-2-fluoro ribonucleotide
  modified_base 9: mod_base = OTHER; note = 2-deoxy-2-fluoro ribonucleotide
  modified_base 11: mod_base = OTHER; note = 2-deoxy-2-fluoro ribonucleotide
  modified_base 13: mod_base = OTHER; note = 2-deoxy-2-fluoro ribonucleotide
  modified_base 15: mod_base = OTHER; note = 2-deoxy-2-fluoro ribonucleotide
  modified_base 17: mod_base = OTHER; note = 2-deoxy-2-fluoro ribonucleotide
  modified_base 19: mod_base = OTHER; note = 2-deoxy-2-fluoro ribonucleotide
  modified_base 20: mod_base = OTHER; note = Thymine
ataccatggatcccagtgat

SEQ ID NO: 906 - RNA, 20 nt, synthetic construct
  source 1..20: mol_type = other RNA
  modified_base 20: mod_base = OTHER; note = inverted deoxyribonucleotide
  modified_base 2: mod_base = OTHER; note = 2'-OMe modified nucleotide
  modified_base 4: mod_base = OTHER; note = 2'-OMe modified nucleotide
  modified_base 6: mod_base = OTHER; note = 2'-OMe modified nucleotide
  modified_base 8: mod_base = OTHER; note = 2'-OMe modified nucleotide
  modified_base 10: mod_base = OTHER; note = 2'-OMe modified nucleotide
  modified_base 12: mod_base = OTHER; note = 2'-OMe modified nucleotide
  modified_base 14: mod_base = OTHER; note = 2'-OMe modified nucleotide
  modified_base 16: mod_base = OTHER; note = 2'-OMe modified nucleotide
  modified_base 18: mod_base = OTHER; note = 2'-OMe modified nucleotide
  modified_base 1: mod_base = OTHER; note = 2-deoxy-2-fluoro ribonucleotide
  modified_base 3: mod_base = OTHER; note = 2-deoxy-2-fluoro ribonucleotide
  modified_base 5: mod_base = OTHER; note = 2-deoxy-2-fluoro ribonucleotide
  modified_base 7: mod_base = OTHER; note = 2-deoxy-2-fluoro ribonucleotide
  modified_base 9: mod_base = OTHER; note = 2-deoxy-2-fluoro ribonucleotide
  modified_base 11: mod_base = OTHER; note = 2-deoxy-2-fluoro ribonucleotide
  modified_base 13: mod_base = OTHER; note = 2-deoxy-2-fluoro ribonucleotide
  modified_base 15: mod_base = OTHER; note = 2-deoxy-2-fluoro ribonucleotide
  modified_base 17: mod_base = OTHER; note = 2-deoxy-2-fluoro ribonucleotide
  modified_base 19: mod_base = OTHER; note = 2-deoxy-2-fluoro ribonucleotide
  modified_base 20: mod_base = OTHER; note = Thymine
cacaactcccacggtggtat

SEQ ID NO: 907 - RNA, 20 nt, synthetic construct
  source 1..20: mol_type = other RNA
  modified_base 20: mod_base = OTHER; note = inverted deoxyribonucleotide
  modified_base 2: mod_base = OTHER; note = 2'-OMe modified nucleotide
  modified_base 4: mod_base = OTHER; note = 2'-OMe modified nucleotide
  modified_base 6: mod_base = OTHER; note = 2'-OMe modified nucleotide
  modified_base 8: mod_base = OTHER; note = 2'-OMe modified nucleotide
  modified_base 10: mod_base = OTHER; note = 2'-OMe modified nucleotide
  modified_base 12: mod_base = OTHER; note = 2'-OMe modified nucleotide
  modified_base 14: mod_base = OTHER; note = 2'-OMe modified nucleotide
  modified_base 16: mod_base = OTHER; note = 2'-OMe modified nucleotide
  modified_base 18: mod_base = OTHER; note = 2'-OMe modified nucleotide
  modified_base 1: mod_base = OTHER; note = 2-deoxy-2-fluoro ribonucleotide
  modified_base 3: mod_base = OTHER; note = 2-deoxy-2-fluoro ribonucleotide
  modified_base 5: mod_base = OTHER; note = 2-deoxy-2-fluoro ribonucleotide
  modified_base 7: mod_base = OTHER; note = 2-deoxy-2-fluoro ribonucleotide
  modified_base 9: mod_base = OTHER; note = 2-deoxy-2-fluoro ribonucleotide
  modified_base 11: mod_base = OTHER; note = 2-deoxy-2-fluoro ribonucleotide
  modified_base 13: mod_base = OTHER; note = 2-deoxy-2-fluoro ribonucleotide
  modified_base 15: mod_base = OTHER; note = 2-deoxy-2-fluoro ribonucleotide
  modified_base 17: mod_base = OTHER; note = 2-deoxy-2-fluoro ribonucleotide
  modified_base 19: mod_base = OTHER; note = 2-deoxy-2-fluoro ribonucleotide
  modified_base 20: mod_base = OTHER; note = Thymine
aagaacatgtcagtcttgat

SEQ ID NO: 908 - RNA, 20 nt, synthetic construct
  source 1..20: mol_type = other RNA
  modified_base 20: mod_base = OTHER; note = inverted deoxyribonucleotide
  modified_base 2: mod_base = OTHER; note = 2'-OMe modified nucleotide
  modified_base 4: mod_base = OTHER; note = 2'-OMe modified nucleotide
  modified_base 6: mod_base = OTHER; note = 2'-OMe modified nucleotide
  modified_base 8: mod_base = OTHER; note = 2'-OMe modified nucleotide
  modified_base 10: mod_base = OTHER; note = 2'-OMe modified nucleotide
  modified_base 12: mod_base = OTHER; note = 2'-OMe modified nucleotide
  modified_base 14: mod_base = OTHER; note = 2'-OMe modified nucleotide
  modified_base 16: mod_base = OTHER; note = 2'-OMe modified nucleotide
  modified_base 18: mod_base = OTHER; note = 2'-OMe modified nucleotide
  modified_base 1: mod_base = OTHER; note = 2-deoxy-2-fluoro ribonucleotide
  modified_base 3: mod_base = OTHER; note = 2-deoxy-2-fluoro ribonucleotide
  modified_base 5: mod_base = OTHER; note = 2-deoxy-2-fluoro ribonucleotide
  modified_base 7: mod_base = OTHER; note = 2-deoxy-2-fluoro ribonucleotide
  modified_base 9: mod_base = OTHER; note = 2-deoxy-2-fluoro ribonucleotide
  modified_base 11: mod_base = OTHER; note = 2-deoxy-2-fluoro ribonucleotide
  modified_base 13: mod_base = OTHER; note = 2-deoxy-2-fluoro ribonucleotide
  modified_base 15: mod_base = OTHER; note = 2-deoxy-2-fluoro ribonucleotide
  modified_base 17: mod_base = OTHER; note = 2-deoxy-2-fluoro ribonucleotide
  modified_base 19: mod_base = OTHER; note = 2-deoxy-2-fluoro ribonucleotide
  modified_base 20: mod_base = OTHER; note = Thymine
agtgtcctcacaactcccat

SEQ ID NO: 909 - RNA, 20 nt, synthetic construct
  source 1..20: mol_type = other RNA
  modified_base 20: mod_base = OTHER; note = inverted deoxyribonucleotide
  modified_base 2: mod_base = OTHER; note = 2'-OMe modified nucleotide
  modified_base 4: mod_base = OTHER; note = 2'-OMe modified nucleotide
  modified_base 6: mod_base = OTHER; note = 2'-OMe modified nucleotide
  modified_base 8: mod_base = OTHER; note = 2'-OMe modified nucleotide
  modified_base 10: mod_base = OTHER; note = 2'-OMe modified nucleotide
  modified_base 12: mod_base = OTHER; note = 2'-OMe modified nucleotide
  modified_base 14: mod_base = OTHER; note = 2'-OMe modified nucleotide
  modified_base 16: mod_base = OTHER; note = 2'-OMe modified nucleotide
  modified_base 18: mod_base = OTHER; note = 2'-OMe modified nucleotide
  modified_base 1: mod_base = OTHER; note = 2-deoxy-2-fluoro ribonucleotide
  modified_base 3: mod_base = OTHER; note = 2-deoxy-2-fluoro ribonucleotide
  modified_base 5: mod_base = OTHER; note = 2-deoxy-2-fluoro ribonucleotide
  modified_base 7: mod_base = OTHER; note = 2-deoxy-2-fluoro ribonucleotide
  modified_base 9: mod_base = OTHER; note = 2-deoxy-2-fluoro ribonucleotide
  modified_base 11: mod_base = OTHER; note = 2-deoxy-2-fluoro ribonucleotide
  modified_base 13: mod_base = OTHER; note = 2-deoxy-2-fluoro ribonucleotide
  modified_base 15: mod_base = OTHER; note = 2-deoxy-2-fluoro ribonucleotide
  modified_base 17: mod_base = OTHER; note = 2-deoxy-2-fluoro ribonucleotide
  modified_base 19: mod_base = OTHER; note = 2-deoxy-2-fluoro ribonucleotide
  modified_base 20: mod_base = OTHER; note = Thymine
aacaagcaccacctgagaat

SEQ ID NO: 910 - RNA, 20 nt, synthetic construct
  source 1..20: mol_type = other RNA
  modified_base 20: mod_base = OTHER; note = inverted deoxyribonucleotide
  modified_base 2: mod_base = OTHER; note = 2'-OMe modified nucleotide
  modified_base 4: mod_base = OTHER; note = 2'-OMe modified nucleotide
  modified_base 6: mod_base = OTHER; note = 2'-OMe modified nucleotide
  modified_base 8: mod_base = OTHER; note = 2'-OMe modified nucleotide
  modified_base 10: mod_base = OTHER; note = 2'-OMe modified nucleotide
  modified_base 12: mod_base = OTHER; note = 2'-OMe modified nucleotide
  modified_base 14: mod_base = OTHER; note = 2'-OMe modified nucleotide
  modified_base 16: mod_base = OTHER; note = 2'-OMe modified nucleotide
  modified_base 18: mod_base = OTHER; note = 2'-OMe modified nucleotide
  modified_base 1: mod_base = OTHER; note = 2-deoxy-2-fluoro ribonucleotide
  modified_base 3: mod_base = OTHER; note = 2-deoxy-2-fluoro ribonucleotide
  modified_base 5: mod_base = OTHER; note = 2-deoxy-2-fluoro ribonucleotide
  modified_base 7: mod_base = OTHER; note = 2-deoxy-2-fluoro ribonucleotide
  modified_base 9: mod_base = OTHER; note = 2-deoxy-2-fluoro ribonucleotide
  modified_base 11: mod_base = OTHER; note = 2-deoxy-2-fluoro ribonucleotide
  modified_base 13: mod_base = OTHER; note = 2-deoxy-2-fluoro ribonucleotide
  modified_base 15: mod_base = OTHER; note = 2-deoxy-2-fluoro ribonucleotide
  modified_base 17: mod_base = OTHER; note = 2-deoxy-2-fluoro ribonucleotide
  modified_base 19: mod_base = OTHER; note = 2-deoxy-2-fluoro ribonucleotide
  modified_base 20: mod_base = OTHER; note = Thymine
cctgagaaaagccctgtgat

SEQ ID NO: 911 - RNA, 20 nt, synthetic construct
  source 1..20: mol_type = other RNA
  modified_base 20: mod_base = OTHER; note = inverted deoxyribonucleotide
  modified_base 2: mod_base = OTHER; note = 2'-OMe modified nucleotide
  modified_base 4: mod_base = OTHER; note = 2'-OMe modified nucleotide
  modified_base 6: mod_base = OTHER; note = 2'-OMe modified nucleotide
  modified_base 8: mod_base = OTHER; note = 2'-OMe modified nucleotide
  modified_base 10: mod_base = OTHER; note = 2'-OMe modified nucleotide
  modified_base 12: mod_base = OTHER; note = 2'-OMe modified nucleotide
  modified_base 14: mod_base = OTHER; note = 2'-OMe modified nucleotide
  modified_base 16: mod_base = OTHER; note = 2'-OMe modified nucleotide
  modified_base 18: mod_base = OTHER; note = 2'-OMe modified nucleotide
  modified_base 1: mod_base = OTHER; note = 2-deoxy-2-fluoro ribonucleotide
  modified_base 3: mod_base = OTHER; note = 2-deoxy-2-fluoro ribonucleotide
  modified_base 5: mod_base = OTHER; note = 2-deoxy-2-fluoro ribonucleotide
  modified_base 7: mod_base = OTHER; note = 2-deoxy-2-fluoro ribonucleotide
  modified_base 9: mod_base = OTHER; note = 2-deoxy-2-fluoro ribonucleotide
  modified_base 11: mod_base = OTHER; note = 2-deoxy-2-fluoro ribonucleotide
  modified_base 13: mod_base = OTHER; note = 2-deoxy-2-fluoro ribonucleotide
  modified_base 15: mod_base = OTHER; note = 2-deoxy-2-fluoro ribonucleotide
  modified_base 17: mod_base = OTHER; note = 2-deoxy-2-fluoro ribonucleotide
  modified_base 19: mod_base = OTHER; note = 2-deoxy-2-fluoro ribonucleotide
  modified_base 20: mod_base = OTHER; note = Thymine
tgataccacactggcatcat

SEQ ID NO: 912 - RNA, 20 nt, synthetic construct
  source 1..20: mol_type = other RNA
  modified_base 20: mod_base = OTHER; note = inverted deoxyribonucleotide
  modified_base 2: mod_base = OTHER; note = 2'-OMe modified nucleotide
  modified_base 4: mod_base = OTHER; note = 2'-OMe modified nucleotide
  modified_base 6: mod_base = OTHER; note = 2'-OMe modified nucleotide
  modified_base 8: mod_base = OTHER; note = 2'-OMe modified nucleotide
  modified_base 10: mod_base = OTHER; note = 2'-OMe modified nucleotide
  modified_base 12: mod_base = OTHER; note = 2'-OMe modified nucleotide
  modified_base 14: mod_base = OTHER; note = 2'-OMe modified nucleotide
  modified_base 16: mod_base = OTHER; note = 2'-OMe modified nucleotide
  modified_base 18: mod_base = OTHER; note = 2'-OMe modified nucleotide
  modified_base 1: mod_base = OTHER; note = 2-deoxy-2-fluoro ribonucleotide
  modified_base 3: mod_base = OTHER; note = 2-deoxy-2-fluoro ribonucleotide
  modified_base 5: mod_base = OTHER; note = 2-deoxy-2-fluoro ribonucleotide
  modified_base 7: mod_base = OTHER; note = 2-deoxy-2-fluoro ribonucleotide
  modified_base 9: mod_base = OTHER; note = 2-deoxy-2-fluoro ribonucleotide
  modified_base 11: mod_base = OTHER; note = 2-deoxy-2-fluoro ribonucleotide
  modified_base 13: mod_base = OTHER; note = 2-deoxy-2-fluoro ribonucleotide
  modified_base 15: mod_base = OTHER; note = 2-deoxy-2-fluoro ribonucleotide
  modified_base 17: mod_base = OTHER; note = 2-deoxy-2-fluoro ribonucleotide
  modified_base 19: mod_base = OTHER; note = 2-deoxy-2-fluoro ribonucleotide
  modified_base 20: mod_base = OTHER; note = Thymine
gataccacactggcatcaat

SEQ ID NO: 913 - RNA, 20 nt, synthetic construct
  source 1..20: mol_type = other RNA
  modified_base 20: mod_base = OTHER; note = inverted deoxyribonucleotide
  modified_base 2: mod_base = OTHER; note = 2'-OMe modified nucleotide
  modified_base 4: mod_base = OTHER; note = 2'-OMe modified nucleotide
  modified_base 6: mod_base = OTHER; note = 2'-OMe modified nucleotide
  modified_base 8: mod_base = OTHER; note = 2'-OMe modified nucleotide
  modified_base 10: mod_base = OTHER; note = 2'-OMe modified nucleotide
  modified_base 12: mod_base = OTHER; note = 2'-OMe modified nucleotide
  modified_base 14: mod_base = OTHER; note = 2'-OMe modified nucleotide
  modified_base 16: mod_base = OTHER; note = 2'-OMe modified nucleotide
  modified_base 18: mod_base = OTHER; note = 2'-OMe modified nucleotide
  modified_base 1: mod_base = OTHER; note = 2-deoxy-2-fluoro ribonucleotide
  modified_base 3: mod_base = OTHER; note = 2-deoxy-2-fluoro ribonucleotide
  modified_base 5: mod_base = OTHER; note = 2-deoxy-2-fluoro ribonucleotide
  modified_base 7: mod_base = OTHER; note = 2-deoxy-2-fluoro ribonucleotide
  modified_base 9: mod_base = OTHER; note = 2-deoxy-2-fluoro ribonucleotide
  modified_base 11: mod_base = OTHER; note = 2-deoxy-2-fluoro ribonucleotide
  modified_base 13: mod_base = OTHER; note = 2-deoxy-2-fluoro ribonucleotide
  modified_base 15: mod_base = OTHER; note = 2-deoxy-2-fluoro ribonucleotide
  modified_base 17: mod_base = OTHER; note = 2-deoxy-2-fluoro ribonucleotide
  modified_base 19: mod_base = OTHER; note = 2-deoxy-2-fluoro ribonucleotide
  modified_base 20: mod_base = OTHER; note = Thymine
gaaacagaatcaggtgtcat

SEQ ID NO: 914 - RNA, 20 nt, synthetic construct
  source 1..20: mol_type = other RNA
  modified_base 20: mod_base = OTHER; note = inverted deoxyribonucleotide
  modified_base 2: mod_base = OTHER; note = 2'-OMe modified nucleotide
  modified_base 4: mod_base = OTHER; note = 2'-OMe modified nucleotide
  modified_base 6: mod_base = OTHER; note = 2'-OMe modified nucleotide
  modified_base 8: mod_base = OTHER; note = 2'-OMe modified nucleotide
  modified_base 10: mod_base = OTHER; note = 2'-OMe modified nucleotide
  modified_base 12: mod_base = OTHER; note = 2'-OMe modified nucleotide
  modified_base 14: mod_base = OTHER; note = 2'-OMe modified nucleotide
  modified_base 16: mod_base = OTHER; note = 2'-OMe modified nucleotide
  modified_base 18: mod_base = OTHER; note = 2'-OMe modified nucleotide
  modified_base 1: mod_base = OTHER; note = 2-deoxy-2-fluoro ribonucleotide
  modified_base 3: mod_base = OTHER; note = 2-deoxy-2-fluoro ribonucleotide
  modified_base 5: mod_base = OTHER; note = 2-deoxy-2-fluoro ribonucleotide
  modified_base 7: mod_base = OTHER; note = 2-deoxy-2-fluoro ribonucleotide
  modified_base 9: mod_base = OTHER; note = 2-deoxy-2-fluoro ribonucleotide
  modified_base 11: mod_base = OTHER; note = 2-deoxy-2-fluoro ribonucleotide
  modified_base 13: mod_base = OTHER; note = 2-deoxy-2-fluoro ribonucleotide
  modified_base 15: mod_base = OTHER; note = 2-deoxy-2-fluoro ribonucleotide
  modified_base 17: mod_base = OTHER; note = 2-deoxy-2-fluoro ribonucleotide
  modified_base 19: mod_base = OTHER; note = 2-deoxy-2-fluoro ribonucleotide
  modified_base 20: mod_base = OTHER; note = Thymine
aaacagaatcaggtgtccat

SEQ ID NO: 915 - RNA, 20 nt, synthetic construct
  source 1..20: mol_type = other RNA
  modified_base 20: mod_base = OTHER; note = inverted deoxyribonucleotide
  modified_base 2: mod_base = OTHER; note = 2'-OMe modified nucleotide
  modified_base 4: mod_base = OTHER; note = 2'-OMe modified nucleotide
  modified_base 6: mod_base = OTHER; note = 2'-OMe modified nucleotide
  modified_base 8: mod_base = OTHER; note = 2'-OMe modified nucleotide
  modified_base 10: mod_base = OTHER; note = 2'-OMe modified nucleotide
  modified_base 12: mod_base = OTHER; note = 2'-OMe modified nucleotide
  modified_base 14: mod_base = OTHER; note = 2'-OMe modified nucleotide
  modified_base 16: mod_base = OTHER; note = 2'-OMe modified nucleotide
  modified_base 18: mod_base = OTHER; note = 2'-OMe modified nucleotide
  modified_base 1: mod_base = OTHER; note = 2-deoxy-2-fluoro ribonucleotide
  modified_base 3: mod_base = OTHER; note = 2-deoxy-2-fluoro ribonucleotide
  modified_base 5: mod_base = OTHER; note = 2-deoxy-2-fluoro ribonucleotide
  modified_base 7: mod_base = OTHER; note = 2-deoxy-2-fluoro ribonucleotide
  modified_base 9: mod_base = OTHER; note = 2-deoxy-2-fluoro ribonucleotide
  modified_base 11: mod_base = OTHER; note = 2-deoxy-2-fluoro ribonucleotide
  modified_base 13: mod_base = OTHER; note = 2-deoxy-2-fluoro ribonucleotide
  modified_base 15: mod_base = OTHER; note = 2-deoxy-2-fluoro ribonucleotide
  modified_base 17: mod_base = OTHER; note = 2-deoxy-2-fluoro ribonucleotide
  modified_base 19: mod_base = OTHER; note = 2-deoxy-2-fluoro ribonucleotide
  modified_base 20: mod_base = OTHER; note = Thymine
cagaatcaggtgtcctagat

SEQ ID NO: 916 - RNA, 20 nt, synthetic construct
  source 1..20: mol_type = other RNA
  modified_base 20: mod_base = OTHER; note = inverted deoxyribonucleotide
  modified_base 2: mod_base = OTHER; note = 2'-OMe modified nucleotide
  modified_base 4: mod_base = OTHER; note = 2'-OMe modified nucleotide
  modified_base 6: mod_base = OTHER; note = 2'-OMe modified nucleotide
  modified_base 8: mod_base = OTHER; note = 2'-OMe modified nucleotide
  modified_base 10: mod_base = OTHER; note = 2'-OMe modified nucleotide
  modified_base 12: mod_base = OTHER; note = 2'-OMe modified nucleotide
  modified_base 14: mod_base = OTHER; note = 2'-OMe modified nucleotide
  modified_base 16: mod_base = OTHER; note = 2'-OMe modified nucleotide
  modified_base 18: mod_base = OTHER; note = 2'-OMe modified nucleotide
  modified_base 1: mod_base = OTHER; note = 2-deoxy-2-fluoro ribonucleotide
  modified_base 3: mod_base = OTHER; note = 2-deoxy-2-fluoro ribonucleotide
  modified_base 5: mod_base = OTHER; note = 2-deoxy-2-fluoro ribonucleotide
  modified_base 7: mod_base = OTHER; note = 2-deoxy-2-fluoro ribonucleotide
  modified_base 9: mod_base = OTHER; note = 2-deoxy-2-fluoro ribonucleotide
  modified_base 11: mod_base = OTHER; note = 2-deoxy-2-fluoro ribonucleotide
  modified_base 13: mod_base = OTHER; note = 2-deoxy-2-fluoro ribonucleotide
  modified_base 15: mod_base = OTHER; note = 2-deoxy-2-fluoro ribonucleotide
  modified_base 17: mod_base = OTHER; note = 2-deoxy-2-fluoro ribonucleotide
  modified_base 19: mod_base = OTHER; note = 2-deoxy-2-fluoro ribonucleotide
  modified_base 20: mod_base = OTHER; note = Thymine
cctgtggcagccccttatat

SEQ ID NO: 917 - RNA, 20 nt, synthetic construct
  source 1..20: mol_type = other RNA
  modified_base 20: mod_base = OTHER; note = inverted deoxyribonucleotide
  modified_base 2: mod_base = OTHER; note = 2'-OMe modified nucleotide
  modified_base 4: mod_base = OTHER; note = 2'-OMe modified nucleotide
  modified_base 6: mod_base = OTHER; note = 2'-OMe modified nucleotide
  modified_base 8: mod_base = OTHER; note = 2'-OMe modified nucleotide
  modified_base 10: mod_base = OTHER; note = 2'-OMe modified nucleotide
  modified_base 12: mod_base = OTHER; note = 2'-OMe modified nucleotide
  modified_base 14: mod_base = OTHER; note = 2'-OMe modified nucleotide
  modified_base 16: mod_base = OTHER; note = 2'-OMe modified nucleotide
  modified_base 18: mod_base = OTHER; note = 2'-OMe modified nucleotide
  modified_base 1: mod_base = OTHER; note = 2-deoxy-2-fluoro ribonucleotide
  modified_base 3: mod_base = OTHER; note = 2-deoxy-2-fluoro ribonucleotide
  modified_base 5: mod_base = OTHER; note = 2-deoxy-2-fluoro ribonucleotide
  modified_base 7: mod_base = OTHER; note = 2-deoxy-2-fluoro ribonucleotide
  modified_base 9: mod_base = OTHER; note = 2-deoxy-2-fluoro ribonucleotide
  modified_base 11: mod_base = OTHER; note = 2-deoxy-2-fluoro ribonucleotide
  modified_base 13: mod_base = OTHER; note = 2-deoxy-2-fluoro ribonucleotide
  modified_base 15: mod_base = OTHER; note = 2-deoxy-2-fluoro ribonucleotide
  modified_base 17: mod_base = OTHER; note = 2-deoxy-2-fluoro ribonucleotide
  modified_base 19: mod_base = OTHER; note = 2-deoxy-2-fluoro ribonucleotide
  modified_base 20: mod_base = OTHER; note = Thymine
tggcagccccttattgttat

SEQ ID NO: 918 - RNA, 20 nt, synthetic construct
  source 1..20: mol_type = other RNA
  modified_base 20: mod_base = OTHER; note = inverted deoxyribonucleotide
  modified_base 2: mod_base = OTHER; note = 2'-OMe modified nucleotide
  modified_base 4: mod_base = OTHER; note = 2'-OMe modified nucleotide
  modified_base 6: mod_base = OTHER; note = 2'-OMe modified nucleotide
  modified_base 8: mod_base = OTHER; note = 2'-OMe modified nucleotide
  modified_base 10: mod_base = OTHER; note = 2'-OMe modified nucleotide
  modified_base 12: mod_base = OTHER; note = 2'-OMe modified nucleotide
  modified_base 14: mod_base = OTHER; note = 2'-OMe modified nucleotide
  modified_base 16: mod_base = OTHER; note = 2'-OMe modified nucleotide
  modified_base 18: mod_base = OTHER; note = 2'-OMe modified nucleotide
  modified_base 1: mod_base = OTHER; note = 2-deoxy-2-fluoro ribonucleotide
  modified_base 3: mod_base = OTHER; note = 2-deoxy-2-fluoro ribonucleotide
  modified_base 5: mod_base = OTHER; note = 2-deoxy-2-fluoro ribonucleotide
  modified_base 7: mod_base = OTHER; note = 2-deoxy-2-fluoro ribonucleotide
  modified_base 9: mod_base = OTHER; note = 2-deoxy-2-fluoro ribonucleotide
  modified_base 11: mod_base = OTHER; note = 2-deoxy-2-fluoro ribonucleotide
  modified_base 13: mod_base = OTHER; note = 2-deoxy-2-fluoro ribonucleotide
  modified_base 15: mod_base = OTHER; note = 2-deoxy-2-fluoro ribonucleotide
  modified_base 17: mod_base = OTHER; note = 2-deoxy-2-fluoro ribonucleotide
  modified_base 19: mod_base = OTHER; note = 2-deoxy-2-fluoro ribonucleotide
  modified_base 20: mod_base = OTHER; note = Thymine
acaccagcatagtcggacat

SEQ ID NO: 919 - RNA, 20 nt, synthetic construct
  source 1..20: mol_type = other RNA
  modified_base 20: mod_base = OTHER; note = inverted deoxyribonucleotide
  modified_base 2: mod_base = OTHER; note = 2'-OMe modified nucleotide
  modified_base 4: mod_base = OTHER; note = 2'-OMe modified nucleotide
  modified_base 6: mod_base = OTHER; note = 2'-OMe modified nucleotide
  modified_base 8: mod_base = OTHER; note = 2'-OMe modified nucleotide
  modified_base 10: mod_base = OTHER; note = 2'-OMe modified nucleotide
  modified_base 12: mod_base = OTHER; note = 2'-OMe modified nucleotide
  modified_base 14: mod_base = OTHER; note = 2'-OMe modified nucleotide
  modified_base 16: mod_base = OTHER; note = 2'-OMe modified nucleotide
  modified_base 18: mod_base = OTHER; note = 2'-OMe modified nucleotide
  modified_base 1: mod_base = OTHER; note = 2-deoxy-2-fluoro ribonucleotide
  modified_base 3: mod_base = OTHER; note = 2-deoxy-2-fluoro ribonucleotide
  modified_base 5: mod_base = OTHER; note = 2-deoxy-2-fluoro ribonucleotide
  modified_base 7: mod_base = OTHER; note = 2-deoxy-2-fluoro ribonucleotide
  modified_base 9: mod_base = OTHER; note = 2-deoxy-2-fluoro ribonucleotide
  modified_base 11: mod_base = OTHER; note = 2-deoxy-2-fluoro ribonucleotide
  modified_base 13: mod_base = OTHER; note = 2-deoxy-2-fluoro ribonucleotide
  modified_base 15: mod_base = OTHER; note = 2-deoxy-2-fluoro ribonucleotide
  modified_base 17: mod_base = OTHER; note = 2-deoxy-2-fluoro ribonucleotide
  modified_base 19: mod_base = OTHER; note = 2-deoxy-2-fluoro ribonucleotide
  modified_base 20: mod_base = OTHER; note = Thymine
ggaatccagatgctgagaat

SEQ ID NO: 920 - RNA, 20 nt, synthetic construct
  source 1..20: mol_type = other RNA
  modified_base 20: mod_base = OTHER; note = inverted deoxyribonucleotide
  modified_base 2: mod_base = OTHER; note = 2'-OMe modified nucleotide
  modified_base 4: mod_base = OTHER; note = 2'-OMe modified nucleotide
  modified_base 6: mod_base = OTHER; note = 2'-OMe modified nucleotide
  modified_base 8: mod_base = OTHER; note = 2'-OMe modified nucleotide
  modified_base 10: mod_base = OTHER; note = 2'-OMe modified nucleotide
  modified_base 12: mod_base = OTHER; note = 2'-OMe modified nucleotide
  modified_base 14: mod_base = OTHER; note = 2'-OMe modified nucleotide
  modified_base 16: mod_base = OTHER; note = 2'-OMe modified nucleotide
  modified_base 18: mod_base = OTHER; note = 2'-OMe modified nucleotide
  modified_base 1: mod_base = OTHER; note = 2-deoxy-2-fluoro ribonucleotide
  modified_base 3: mod_base = OTHER; note = 2-deoxy-2-fluoro ribonucleotide
  modified_base 5: mod_base = OTHER; note = 2-deoxy-2-fluoro ribonucleotide
  modified_base 7: mod_base = OTHER; note = 2-deoxy-2-fluoro ribonucleotide
  modified_base 9: mod_base = OTHER; note = 2-deoxy-2-fluoro ribonucleotide
  modified_base 11: mod_base = OTHER; note = 2-deoxy-2-fluoro ribonucleotide
  modified_base 13: mod_base = OTHER; note = 2-deoxy-2-fluoro ribonucleotide
  modified_base 15: mod_base = OTHER; note = 2-deoxy-2-fluoro ribonucleotide
  modified_base 17: mod_base = OTHER; note = 2-deoxy-2-fluoro ribonucleotide
  modified_base 19: mod_base = OTHER; note = 2-deoxy-2-fluoro ribonucleotide
  modified_base 20: mod_base = OTHER; note = Thymine
tccagatgctgagattcgat

SEQ ID NO: 921 - RNA, 20 nt, synthetic construct
  source 1..20: mol_type = other RNA
  modified_base 20: mod_base = OTHER; note = inverted deoxyribonucleotide
  modified_base 2: mod_base = OTHER; note = 2'-OMe modified nucleotide
  modified_base 4: mod_base = OTHER; note = 2'-OMe modified nucleotide
  modified_base 6: mod_base = OTHER; note = 2'-OMe modified nucleotide
  modified_base 8: mod_base = OTHER; note = 2'-OMe modified nucleotide
  modified_base 10: mod_base = OTHER; note = 2'-OMe modified nucleotide
  modified_base 12: mod_base = OTHER; note = 2'-OMe modified nucleotide
  modified_base 14: mod_base = OTHER; note = 2'-OMe modified nucleotide
  modified_base 16: mod_base = OTHER; note = 2'-OMe modified nucleotide
  modified_base 18: mod_base = OTHER; note = 2'-OMe modified nucleotide
  modified_base 1: mod_base = OTHER; note = 2-deoxy-2-fluoro ribonucleotide
  modified_base 3: mod_base = OTHER; note = 2-deoxy-2-fluoro ribonucleotide
  modified_base 5: mod_base = OTHER; note = 2-deoxy-2-fluoro ribonucleotide
  modified_base 7: mod_base = OTHER; note = 2-deoxy-2-fluoro ribonucleotide
  modified_base 9: mod_base = OTHER; note = 2-deoxy-2-fluoro ribonucleotide
  modified_base 11: mod_base = OTHER; note = 2-deoxy-2-fluoro ribonucleotide
  modified_base 13: mod_base = OTHER; note = 2-deoxy-2-fluoro ribonucleotide
  modified_base 15: mod_base = OTHER; note = 2-deoxy-2-fluoro ribonucleotide
  modified_base 17: mod_base = OTHER; note = 2-deoxy-2-fluoro ribonucleotide
  modified_base 19: mod_base = OTHER; note = 2-deoxy-2-fluoro ribonucleotide
  modified_base 20: mod_base = OTHER; note = Thymine
atgctgagattcgcccttat

SEQ ID NO: 922 - RNA, 20 nt, synthetic construct
  source 1..20: mol_type = other RNA
  modified_base 20: mod_base = OTHER; note = inverted deoxyribonucleotide
  modified_base 2: mod_base = OTHER; note = 2'-OMe modified nucleotide
  modified_base 4: mod_base = OTHER; note = 2'-OMe modified nucleotide
  modified_base 6: mod_base = OTHER; note = 2'-OMe modified nucleotide
  modified_base 8: mod_base = OTHER; note = 2'-OMe modified nucleotide
  modified_base 10: mod_base = OTHER; note = 2'-OMe modified nucleotide
  modified_base 12: mod_base = OTHER; note = 2'-OMe modified nucleotide
  modified_base 14: mod_base = OTHER; note = 2'-OMe modified nucleotide
  modified_base 16: mod_base = OTHER; note = 2'-OMe modified nucleotide
  modified_base 18: mod_base = OTHER; note = 2'-OMe modified nucleotide
  modified_base 1: mod_base = OTHER; note = 2-deoxy-2-fluoro ribonucleotide
  modified_base 3: mod_base = OTHER; note = 2-deoxy-2-fluoro ribonucleotide
  modified_base 5: mod_base = OTHER; note = 2-deoxy-2-fluoro ribonucleotide
  modified_base 7: mod_base = OTHER; note = 2-deoxy-2-fluoro ribonucleotide
  modified_base 9: mod_base = OTHER; note = 2-deoxy-2-fluoro ribonucleotide
  modified_base 11: mod_base = OTHER; note = 2-deoxy-2-fluoro ribonucleotide
  modified_base 13: mod_base = OTHER; note = 2-deoxy-2-fluoro ribonucleotide
  modified_base 15: mod_base = OTHER; note = 2-deoxy-2-fluoro ribonucleotide
  modified_base 17: mod_base = OTHER; note = 2-deoxy-2-fluoro ribonucleotide
  modified_base 19: mod_base = OTHER; note = 2-deoxy-2-fluoro ribonucleotide
  modified_base 20: mod_base = OTHER; note = Thymine
ccatggatcccagtgtcaat

SEQ ID NO: 923 - RNA, 20 nt, synthetic construct
  source 1..20: mol_type = other RNA
  modified_base 20: mod_base = OTHER; note = inverted deoxyribonucleotide
  modified_base 2: mod_base = OTHER; note = 2'-OMe modified nucleotide
  modified_base 4: mod_base = OTHER; note = 2'-OMe modified nucleotide
  modified_base 6: mod_base = OTHER; note = 2'-OMe modified nucleotide
  modified_base 8: mod_base = OTHER; note = 2'-OMe modified nucleotide
  modified_base 10: mod_base = OTHER; note = 2'-OMe modified nucleotide
  modified_base 12: mod_base = OTHER; note = 2'-OMe modified nucleotide
  modified_base 14: mod_base = OTHER; note = 2'-OMe modified nucleotide
  modified_base 16: mod_base = OTHER; note = 2'-OMe modified nucleotide
  modified_base 18: mod_base = OTHER; note = 2'-OMe modified nucleotide
  modified_base 1: mod_base = OTHER; note = 2-deoxy-2-fluoro ribonucleotide
  modified_base 3: mod_base = OTHER; note = 2-deoxy-2-fluoro ribonucleotide
  modified_base 5: mod_base = OTHER; note = 2-deoxy-2-fluoro ribonucleotide
  modified_base 7: mod_base = OTHER; note = 2-deoxy-2-fluoro ribonucleotide
  modified_base 9: mod_base = OTHER; note = 2-deoxy-2-fluoro ribonucleotide
  modified_base 11: mod_base = OTHER; note = 2-deoxy-2-fluoro ribonucleotide
  modified_base 13: mod_base = OTHER; note = 2-deoxy-2-fluoro ribonucleotide
  modified_base 15: mod_base = OTHER; note = 2-deoxy-2-fluoro ribonucleotide
  modified_base 17: mod_base = OTHER; note = 2-deoxy-2-fluoro ribonucleotide
  modified_base 19: mod_base = OTHER; note = 2-deoxy-2-fluoro ribonucleotide
  modified_base 20: mod_base = OTHER; note = Thymine
ctgaagaagcaccaacggat

SEQ ID NO: 924 - RNA, 20 nt, synthetic construct
  source 1..20: mol_type = other RNA
  modified_base 20: mod_base = OTHER; note = inverted deoxyribonucleotide
  modified_base 2: mod_base = OTHER; note = 2'-OMe modified nucleotide
  modified_base 4: mod_base = OTHER; note = 2'-OMe modified nucleotide
  modified_base 6: mod_base = OTHER; note = 2'-OMe modified nucleotide
  modified_base 8: mod_base = OTHER; note = 2'-OMe modified nucleotide
  modified_base 10: mod_base = OTHER; note = 2'-OMe modified nucleotide
  modified_base 12: mod_base = OTHER; note = 2'-OMe modified nucleotide
  modified_base 14: mod_base = OTHER; note = 2'-OMe modified nucleotide
  modified_base 16: mod_base = OTHER; note = 2'-OMe modified nucleotide
  modified_base 18: mod_base = OTHER; note = 2'-OMe modified nucleotide
  modified_base 1: mod_base = OTHER; note = 2-deoxy-2-fluoro ribonucleotide
  modified_base 3: mod_base = OTHER; note = 2-deoxy-2-fluoro ribonucleotide
  modified_base 5: mod_base = OTHER; note = 2-deoxy-2-fluoro ribonucleotide
  modified_base 7: mod_base = OTHER; note = 2-deoxy-2-fluoro ribonucleotide
  modified_base 9: mod_base = OTHER; note = 2-deoxy-2-fluoro ribonucleotide
  modified_base 11: mod_base = OTHER; note = 2-deoxy-2-fluoro ribonucleotide
  modified_base 13: mod_base = OTHER; note = 2-deoxy-2-fluoro ribonucleotide
  modified_base 15: mod_base = OTHER; note = 2-deoxy-2-fluoro ribonucleotide
  modified_base 17: mod_base = OTHER; note = 2-deoxy-2-fluoro ribonucleotide
  modified_base 19: mod_base = OTHER; note = 2-deoxy-2-fluoro ribonucleotide
  modified_base 20: mod_base = OTHER; note = Thymine
tccagtgacagaatcaagat

SEQ ID NO: 925 - RNA, 20 nt, synthetic construct
  source 1..20: mol_type = other RNA
  modified_base 20: mod_base = OTHER; note = inverted deoxyribonucleotide
  modified_base 2: mod_base = OTHER; note = 2'-OMe modified nucleotide
  modified_base 4: mod_base = OTHER; note = 2'-OMe modified nucleotide
  modified_base 6: mod_base = OTHER; note = 2'-OMe modified nucleotide
  modified_base 8: mod_base = OTHER; note = 2'-OMe modified nucleotide
  modified_base 10: mod_base = OTHER; note = 2'-OMe modified nucleotide
  modified_base 12: mod_base = OTHER; note = 2'-OMe modified nucleotide
  modified_base 14: mod_base = OTHER; note = 2'-OMe modified nucleotide
  modified_base 16: mod_base = OTHER; note = 2'-OMe modified nucleotide
  modified_base 18: mod_base = OTHER; note = 2'-OMe modified nucleotide
  modified_base 1: mod_base = OTHER; note = 2-deoxy-2-fluoro ribonucleotide
  modified_base 3: mod_base = OTHER; note = 2-deoxy-2-fluoro ribonucleotide
  modified_base 5: mod_base = OTHER; note = 2-deoxy-2-fluoro ribonucleotide
  modified_base 7: mod_base = OTHER; note = 2-deoxy-2-fluoro ribonucleotide
  modified_base 9: mod_base = OTHER; note = 2-deoxy-2-fluoro ribonucleotide
  modified_base 11: mod_base = OTHER; note = 2-deoxy-2-fluoro ribonucleotide
  modified_base 13: mod_base = OTHER; note = 2-deoxy-2-fluoro ribonucleotide
  modified_base 15: mod_base = OTHER; note = 2-deoxy-2-fluoro ribonucleotide
  modified_base 17: mod_base = OTHER; note = 2-deoxy-2-fluoro ribonucleotide
  modified_base 19: mod_base = OTHER; note = 2-deoxy-2-fluoro ribonucleotide
  modified_base 20: mod_base = OTHER; note = Thymine
ctcacaactcccacggtgat

SEQ ID NO: 926 - RNA, 20 nt, synthetic construct
  source 1..20: mol_type = other RNA
  modified_base 20: mod_base = OTHER; note = inverted deoxyribonucleotide
  modified_base 2: mod_base = OTHER; note = 2'-OMe modified nucleotide
  modified_base 4: mod_base = OTHER; note = 2'-OMe modified nucleotide
  modified_base 6: mod_base = OTHER; note = 2'-OMe modified nucleotide
  modified_base 8: mod_base = OTHER; note = 2'-OMe modified nucleotide
  modified_base 10: mod_base = OTHER; note = 2'-OMe modified nucleotide
  modified_base 12: mod_base = OTHER; note = 2'-OMe modified nucleotide
  modified_base 14: mod_base = OTHER; note = 2'-OMe modified nucleotide
  modified_base 16: mod_base = OTHER; note = 2'-OMe modified nucleotide
  modified_base 18: mod_base = OTHER; note = 2'-OMe modified nucleotide
  modified_base 1: mod_base = OTHER; note = 2-deoxy-2-fluoro ribonucleotide
  modified_base 3: mod_base = OTHER; note = 2-deoxy-2-fluoro ribonucleotide
  modified_base 5: mod_base = OTHER; note = 2-deoxy-2-fluoro ribonucleotide
  modified_base 7: mod_base = OTHER; note = 2-deoxy-2-fluoro ribonucleotide
  modified_base 9: mod_base = OTHER; note = 2-deoxy-2-fluoro ribonucleotide
  modified_base 11: mod_base = OTHER; note = 2-deoxy-2-fluoro ribonucleotide
  modified_base 13: mod_base = OTHER; note = 2-deoxy-2-fluoro ribonucleotide
  modified_base 15: mod_base = OTHER; note = 2-deoxy-2-fluoro ribonucleotide
  modified_base 17: mod_base = OTHER; note = 2-deoxy-2-fluoro ribonucleotide
  modified_base 19: mod_base = OTHER; note = 2-deoxy-2-fluoro ribonucleotide
  modified_base 20: mod_base = OTHER; note = Thymine
agaatcaggtgtcctagaat

SEQ ID NO: 927 - RNA, 20 nt, synthetic construct
  source 1..20: mol_type = other RNA
  modified_base 20: mod_base = OTHER; note = inverted deoxyribonucleotide
  modified_base 2: mod_base = OTHER; note = 2'-OMe modified nucleotide
  modified_base 4: mod_base = OTHER; note = 2'-OMe modified nucleotide
  modified_base 6: mod_base = OTHER; note = 2'-OMe modified nucleotide
  modified_base 8: mod_base = OTHER; note = 2'-OMe modified nucleotide
  modified_base 10: mod_base = OTHER; note = 2'-OMe modified nucleotide
  modified_base 12: mod_base = OTHER; note = 2'-OMe modified nucleotide
  modified_base 14: mod_base = OTHER; note = 2'-OMe modified nucleotide
  modified_base 16: mod_base = OTHER; note = 2'-OMe modified nucleotide
  modified_base 18: mod_base = OTHER; note = 2'-OMe modified nucleotide
  modified_base 1: mod_base = OTHER; note = 2-deoxy-2-fluoro ribonucleotide
  modified_base 3: mod_base = OTHER; note = 2-deoxy-2-fluoro ribonucleotide
  modified_base 5: mod_base = OTHER; note = 2-deoxy-2-fluoro ribonucleotide
  modified_base 7: mod_base = OTHER; note = 2-deoxy-2-fluoro ribonucleotide
  modified_base 9: mod_base = OTHER; note = 2-deoxy-2-fluoro ribonucleotide
  modified_base 11: mod_base = OTHER; note = 2-deoxy-2-fluoro ribonucleotide
  modified_base 13: mod_base = OTHER; note = 2-deoxy-2-fluoro ribonucleotide
  modified_base 15: mod_base = OTHER; note = 2-deoxy-2-fluoro ribonucleotide
  modified_base 17: mod_base = OTHER; note = 2-deoxy-2-fluoro ribonucleotide
  modified_base 19: mod_base = OTHER; note = 2-deoxy-2-fluoro ribonucleotide
  modified_base 20: mod_base = OTHER; note = Thymine
tcaggtgtcctagagactat

SEQ ID NO: 928 - RNA, 23 nt, synthetic construct
  source 1..23: mol_type = other RNA
  modified_base 23: mod_base = OTHER; note = inverted deoxyribonucleotide
  modified_base 1: mod_base = OTHER; note = 2'-OMe modified nucleotide
  modified_base 3: mod_base = OTHER; note = 2'-OMe modified nucleotide
  modified_base 5: mod_base = OTHER; note = 2'-OMe modified nucleotide
  modified_base 7: mod_base = OTHER; note = 2'-OMe modified nucleotide
  modified_base 9: mod_base = OTHER; note = 2'-OMe modified nucleotide
  modified_base 13: mod_base = OTHER; note = 2'-OMe modified nucleotide
  modified_base 15: mod_base = OTHER; note = 2'-OMe modified nucleotide
  modified_base 17: mod_base = OTHER; note = 2'-OMe modified nucleotide
  modified_base 19: mod_base = OTHER; note = 2'-OMe modified nucleotide
  modified_base 21: mod_base = OTHER; note = 2'-OMe modified nucleotide
  modified_base 4: mod_base = OTHER; note = 2-deoxy-2-fluoro ribonucleotide
  modified_base 6: mod_base = OTHER; note = 2-deoxy-2-fluoro ribonucleotide
  modified_base 8: mod_base = OTHER; note = 2-deoxy-2-fluoro ribonucleotide
  modified_base 10..12: mod_base = OTHER; note = 2-deoxy-2-fluoro ribonucleotide
  modified_base 14: mod_base = OTHER; note = 2-deoxy-2-fluoro ribonucleotide
  modified_base 16: mod_base = OTHER; note = 2-deoxy-2-fluoro ribonucleotide
  modified_base 18: mod_base = OTHER; note = 2-deoxy-2-fluoro ribonucleotide
  modified_base 20: mod_base = OTHER; note = 2-deoxy-2-fluoro ribonucleotide
  modified_base 22: mod_base = OTHER; note = 2-deoxy-2-fluoro ribonucleotide
  modified_base 23: mod_base = OTHER; note = Thymine
tatagccccttattgttatacat

SEQ ID NO: 929 - RNA, 23 nt, synthetic construct
  source 1..23: mol_type = other RNA
  modified_base 23: mod_base = OTHER; note = inverted deoxyribonucleotide
  modified_base 1: mod_base = OTHER; note = 2'-OMe modified nucleotide
  modified_base 3: mod_base = OTHER; note = 2'-OMe modified nucleotide
  modified_base 5: mod_base = OTHER; note = 2'-OMe modified nucleotide
  modified_base 7: mod_base = OTHER; note = 2'-OMe modified nucleotide
  modified_base 9: mod_base = OTHER; note = 2'-OMe modified nucleotide
  modified_base 13: mod_base = OTHER; note = 2'-OMe modified nucleotide
  modified_base 15: mod_base = OTHER; note = 2'-OMe modified nucleotide
  modified_base 17: mod_base = OTHER; note = 2'-OMe modified nucleotide
  modified_base 19: mod_base = OTHER; note = 2'-OMe modified nucleotide
  modified_base 21: mod_base = OTHER; note = 2'-OMe modified nucleotide
  modified_base 4: mod_base = OTHER; note = 2-deoxy-2-fluoro ribonucleotide
  modified_base 6: mod_base = OTHER; note = 2-deoxy-2-fluoro ribonucleotide
  modified_base 8: mod_base = OTHER; note = 2-deoxy-2-fluoro ribonucleotide
  modified_base 10..12: mod_base = OTHER; note = 2-deoxy-2-fluoro ribonucleotide
  modified_base 14: mod_base = OTHER; note = 2-deoxy-2-fluoro ribonucleotide
  modified_base 16: mod_base = OTHER; note = 2-deoxy-2-fluoro ribonucleotide
  modified_base 18: mod_base = OTHER; note = 2-deoxy-2-fluoro ribonucleotide
  modified_base 20: mod_base = OTHER; note = 2-deoxy-2-fluoro ribonucleotide
  modified_base 22: mod_base = OTHER; note = 2-deoxy-2-fluoro ribonucleotide
  modified_base 23: mod_base = OTHER; note = Thymine
tatgccccttattgttatacgat

SEQ ID NO: 930 - RNA, 23 nt, synthetic construct
  source 1..23: mol_type = other RNA
  modified_base 23: mod_base = OTHER; note = inverted deoxyribonucleotide
  modified_base 1: mod_base = OTHER; note = 2'-OMe modified nucleotide
  modified_base 3: mod_base = OTHER; note = 2'-OMe modified nucleotide
  modified_base 5: mod_base = OTHER; note = 2'-OMe modified nucleotide
  modified_base 7: mod_base = OTHER; note = 2'-OMe modified nucleotide
  modified_base 9: mod_base = OTHER; note = 2'-OMe modified nucleotide
  modified_base 13: mod_base = OTHER; note = 2'-OMe modified nucleotide
  modified_base 15: mod_base = OTHER; note = 2'-OMe modified nucleotide
  modified_base 17: mod_base = OTHER; note = 2'-OMe modified nucleotide
  modified_base 19: mod_base = OTHER; note = 2'-OMe modified nucleotide
  modified_base 21: mod_base = OTHER; note = 2'-OMe modified nucleotide
  modified_base 4: mod_base = OTHER; note = 2-deoxy-2-fluoro ribonucleotide
  modified_base 6: mod_base = OTHER; note = 2-deoxy-2-fluoro ribonucleotide
  modified_base 8: mod_base = OTHER; note = 2-deoxy-2-fluoro ribonucleotide
  modified_base 10..12: mod_base = OTHER; note = 2-deoxy-2-fluoro ribonucleotide
  modified_base 14: mod_base = OTHER; note = 2-deoxy-2-fluoro ribonucleotide
  modified_base 16: mod_base = OTHER; note = 2-deoxy-2-fluoro ribonucleotide
  modified_base 18: mod_base = OTHER; note = 2-deoxy-2-fluoro ribonucleotide
  modified_base 20: mod_base = OTHER; note = 2-deoxy-2-fluoro ribonucleotide
  modified_base 22: mod_base = OTHER; note = 2-deoxy-2-fluoro ribonucleotide
  modified_base 23: mod_base = OTHER; note = Thymine
tatgacacaatgctcagacgcat

SEQ ID NO: 931 - RNA, 23 nt, synthetic construct
  source 1..23: mol_type = other RNA
  modified_base 23: mod_base = OTHER; note = inverted deoxyribonucleotide
  modified_base 1: mod_base = OTHER; note = 2'-OMe modified nucleotide
  modified_base 3: mod_base = OTHER; note = 2'-OMe modified nucleotide
  modified_base 5: mod_base = OTHER; note = 2'-OMe modified nucleotide
  modified_base 7: mod_base = OTHER; note = 2'-OMe modified nucleotide
  modified_base 9: mod_base = OTHER; note = 2'-OMe modified nucleotide
  modified_base 13: mod_base = OTHER; note = 2'-OMe modified nucleotide
  modified_base 15: mod_base = OTHER; note = 2'-OMe modified nucleotide
  modified_base 17: mod_base = OTHER; note = 2'-OMe modified nucleotide
  modified_base 19: mod_base = OTHER; note = 2'-OMe modified nucleotide
  modified_base 21: mod_base = OTHER; note = 2'-OMe modified nucleotide
  modified_base 4: mod_base = OTHER; note = 2-deoxy-2-fluoro ribonucleotide
  modified_base 6: mod_base = OTHER; note = 2-deoxy-2-fluoro ribonucleotide
  modified_base 8: mod_base = OTHER; note = 2-deoxy-2-fluoro ribonucleotide
  modified_base 10..12: mod_base = OTHER; note = 2-deoxy-2-fluoro ribonucleotide
  modified_base 14: mod_base = OTHER; note = 2-deoxy-2-fluoro ribonucleotide
  modified_base 16: mod_base = OTHER; note = 2-deoxy-2-fluoro ribonucleotide
  modified_base 18: mod_base = OTHER; note = 2-deoxy-2-fluoro ribonucleotide
  modified_base 20: mod_base = OTHER; note = 2-deoxy-2-fluoro ribonucleotide
  modified_base 22: mod_base = OTHER; note = 2-deoxy-2-fluoro ribonucleotide
  modified_base 23: mod_base = OTHER; note = Thymine
tatacacaatgctcagacgcaat

SEQ ID NO: 932 - RNA, 23 nt, synthetic construct
  source 1..23: mol_type = other RNA
  modified_base 23: mod_base = OTHER; note = inverted deoxyribonucleotide
  modified_base 1: mod_base = OTHER; note = 2'-OMe modified nucleotide
  modified_base 3: mod_base = OTHER; note = 2'-OMe modified nucleotide
  modified_base 5: mod_base = OTHER; note = 2'-OMe modified nucleotide
  modified_base 7: mod_base = OTHER; note = 2'-OMe modified nucleotide
  modified_base 9: mod_base = OTHER; note = 2'-OMe modified nucleotide
  modified_base 13: mod_base = OTHER; note = 2'-OMe modified nucleotide
  modified_base 15: mod_base = OTHER; note = 2'-OMe modified nucleotide
  modified_base 17: mod_base = OTHER; note = 2'-OMe modified nucleotide
  modified_base 19: mod_base = OTHER; note = 2'-OMe modified nucleotide
  modified_base 21: mod_base = OTHER; note = 2'-OMe modified nucleotide
  modified_base 4: mod_base = OTHER; note = 2-deoxy-2-fluoro ribonucleotide
  modified_base 6: mod_base = OTHER; note = 2-deoxy-2-fluoro ribonucleotide
  modified_base 8: mod_base = OTHER; note = 2-deoxy-2-fluoro ribonucleotide
  modified_base 10..12: mod_base = OTHER; note = 2-deoxy-2-fluoro ribonucleotide
  modified_base 14: mod_base = OTHER; note = 2-deoxy-2-fluoro ribonucleotide
  modified_base 16: mod_base = OTHER; note = 2-deoxy-2-fluoro ribonucleotide
  modified_base 18: mod_base = OTHER; note = 2-deoxy-2-fluoro ribonucleotide
  modified_base 20: mod_base = OTHER; note = 2-deoxy-2-fluoro ribonucleotide
  modified_base 22: mod_base = OTHER; note = 2-deoxy-2-fluoro ribonucleotide
  modified_base 23: mod_base = OTHER; note = Thymine
tatttatcgaggctcattctcat

SEQ ID NO: 933 - RNA, 23 nt, synthetic construct
  source 1..23: mol_type = other RNA
  modified_base 23: mod_base = OTHER; note = inverted deoxyribonucleotide
  modified_base 1: mod_base = OTHER; note = 2'-OMe modified nucleotide
  modified_base 3: mod_base = OTHER; note = 2'-OMe modified nucleotide
  modified_base 5: mod_base = OTHER; note = 2'-OMe modified nucleotide
  modified_base 7: mod_base = OTHER; note = 2'-OMe modified nucleotide
  modified_base 9: mod_base = OTHER; note = 2'-OMe modified nucleotide
  modified_base 13: mod_base = OTHER; note = 2'-OMe modified nucleotide
  modified_base 15: mod_base = OTHER; note = 2'-OMe modified nucleotide
  modified_base 17: mod_base = OTHER; note = 2'-OMe modified nucleotide
  modified_base 19: mod_base = OTHER; note = 2'-OMe modified nucleotide
  modified_base 21: mod_base = OTHER; note = 2'-OMe modified nucleotide
  modified_base 4: mod_base = OTHER; note = 2-deoxy-2-fluoro ribonucleotide
  modified_base 6: mod_base = OTHER; note = 2-deoxy-2-fluoro ribonucleotide
  modified_base 8: mod_base = OTHER; note = 2-deoxy-2-fluoro ribonucleotide
  modified_base 10..12: mod_base = OTHER; note = 2-deoxy-2-fluoro ribonucleotide
  modified_base 14: mod_base = OTHER; note = 2-deoxy-2-fluoro ribonucleotide
  modified_base 16: mod_base = OTHER; note = 2-deoxy-2-fluoro ribonucleotide
  modified_base 18: mod_base = OTHER; note = 2-deoxy-2-fluoro ribonucleotide
  modified_base 20: mod_base = OTHER; note = 2-deoxy-2-fluoro ribonucleotide
  modified_base 22: mod_base = OTHER; note = 2-deoxy-2-fluoro ribonucleotide
  modified_base 23: mod_base = OTHER; note = Thymine
tatgaaacagaatcaggtgtcat

SEQ ID NO: 934 - RNA, 23 nt, synthetic construct
  source 1..23: mol_type = other RNA
  modified_base 23: mod_base = OTHER; note = inverted deoxyribonucleotide
  modified_base 1: mod_base = OTHER; note = 2'-OMe modified nucleotide
  modified_base 3: mod_base = OTHER; note = 2'-OMe modified nucleotide
  modified_base 5: mod_base = OTHER; note = 2'-OMe modified nucleotide
  modified_base 7: mod_base = OTHER; note = 2'-OMe modified nucleotide
  modified_base 9: mod_base = OTHER; note = 2'-OMe modified nucleotide
  modified_base 13: mod_base = OTHER; note = 2'-OMe modified nucleotide
  modified_base 15: mod_base = OTHER; note = 2'-OMe modified nucleotide
  modified_base 17: mod_base = OTHER; note = 2'-OMe modified nucleotide
  modified_base 19: mod_base = OTHER; note = 2'-OMe modified nucleotide
  modified_base 21: mod_base = OTHER; note = 2'-OMe modified nucleotide
  modified_base 4: mod_base = OTHER; note = 2-deoxy-2-fluoro ribonucleotide
  modified_base 6: mod_base = OTHER; note = 2-deoxy-2-fluoro ribonucleotide
  modified_base 8: mod_base = OTHER; note = 2-deoxy-2-fluoro ribonucleotide
  modified_base 10..12: mod_base = OTHER; note = 2-deoxy-2-fluoro ribonucleotide
  modified_base 14: mod_base = OTHER; note = 2-deoxy-2-fluoro ribonucleotide
  modified_base 16: mod_base = OTHER; note = 2-deoxy-2-fluoro ribonucleotide
  modified_base 18: mod_base = OTHER; note = 2-deoxy-2-fluoro ribonucleotide
  modified_base 20: mod_base = OTHER; note = 2-deoxy-2-fluoro ribonucleotide
  modified_base 22: mod_base = OTHER; note = 2-deoxy-2-fluoro ribonucleotide
  modified_base 23: mod_base = OTHER; note = Thymine
tatacaccagcatagtcggacat

SEQ ID NO: 935 - RNA, 23 nt, synthetic construct
  source 1..23: mol_type = other RNA
  modified_base 23: mod_base = OTHER; note = inverted deoxyribonucleotide
  modified_base 1: mod_base = OTHER; note = 2'-OMe modified nucleotide
  modified_base 3: mod_base = OTHER; note = 2'-OMe modified nucleotide
  modified_base 5: mod_base = OTHER; note = 2'-OMe modified nucleotide
  modified_base 7: mod_base = OTHER; note = 2'-OMe modified nucleotide
  modified_base 9: mod_base = OTHER; note = 2'-OMe modified nucleotide
  modified_base 13: mod_base = OTHER; note = 2'-OMe modified nucleotide
  modified_base 15: mod_base = OTHER; note = 2'-OMe modified nucleotide
  modified_base 17: mod_base = OTHER; note = 2'-OMe modified nucleotide
  modified_base 19: mod_base = OTHER; note = 2'-OMe modified nucleotide
  modified_base 21: mod_base = OTHER; note = 2'-OMe modified nucleotide
  modified_base 4: mod_base = OTHER; note = 2-deoxy-2-fluoro ribonucleotide
  modified_base 6: mod_base = OTHER; note = 2-deoxy-2-fluoro ribonucleotide
  modified_base 8: mod_base = OTHER; note = 2-deoxy-2-fluoro ribonucleotide
  modified_base 10..12: mod_base = OTHER; note = 2-deoxy-2-fluoro ribonucleotide
  modified_base 14: mod_base = OTHER; note = 2-deoxy-2-fluoro ribonucleotide
  modified_base 16: mod_base = OTHER; note = 2-deoxy-2-fluoro ribonucleotide
  modified_base 18: mod_base = OTHER; note = 2-deoxy-2-fluoro ribonucleotide
  modified_base 20: mod_base = OTHER; note = 2-deoxy-2-fluoro ribonucleotide
  modified_base 22: mod_base = OTHER; note = 2-deoxy-2-fluoro ribonucleotide
  modified_base 23: mod_base = OTHER; note = Thymine
tattccagatgctgagattcgat

SEQ ID NO: 936 - RNA, 23 nt, synthetic construct
  source 1..23: mol_type = other RNA
  modified_base 23: mod_base = OTHER; note = inverted deoxyribonucleotide
  modified_base 1: mod_base = OTHER; note = 2'-OMe modified nucleotide
  modified_base 3: mod_base = OTHER; note = 2'-OMe modified nucleotide
  modified_base 5: mod_base = OTHER; note = 2'-OMe modified nucleotide
  modified_base 7: mod_base = OTHER; note = 2'-OMe modified nucleotide
  modified_base 9: mod_base = OTHER; note = 2'-OMe modified nucleotide
  modified_base 11: mod_base = OTHER; note = 2'-OMe modified nucleotide
  modified_base 13: mod_base = OTHER; note = 2'-OMe modified nucleotide
  modified_base 15: mod_base = OTHER; note = 2'-OMe modified nucleotide
  modified_base 17: mod_base = OTHER; note = 2'-OMe modified nucleotide
  modified_base 19: mod_base = OTHER; note = 2'-OMe modified nucleotide
  modified_base 21: mod_base = OTHER; note = 2'-OMe modified nucleotide
  modified_base 4: mod_base = OTHER; note = 2-deoxy-2-fluoro ribonucleotide
  modified_base 6: mod_base = OTHER; note = 2-deoxy-2-fluoro ribonucleotide
  modified_base 8: mod_base = OTHER; note = 2-deoxy-2-fluoro ribonucleotide
  modified_base 10: mod_base = OTHER; note = 2-deoxy-2-fluoro ribonucleotide
  modified_base 12: mod_base = OTHER; note = 2-deoxy-2-fluoro ribonucleotide
  modified_base 14: mod_base = OTHER; note = 2-deoxy-2-fluoro ribonucleotide
  modified_base 16: mod_base = OTHER; note = 2-deoxy-2-fluoro ribonucleotide
  modified_base 18: mod_base = OTHER; note = 2-deoxy-2-fluoro ribonucleotide
  modified_base 20: mod_base = OTHER; note = 2-deoxy-2-fluoro ribonucleotide
  modified_base 22: mod_base = OTHER; note = 2-deoxy-2-fluoro ribonucleotide
  modified_base 23: mod_base = OTHER; note = Thymine
tatatgctgagattcgcccttat

SEQ ID NO: 937 - RNA, 23 nt, synthetic construct
  source 1..23: mol_type = other RNA
  modified_base 23: mod_base = OTHER; note = inverted deoxyribonucleotide
  modified_base 1: mod_base = OTHER; note = 2'-OMe modified nucleotide
  modified_base 3: mod_base = OTHER; note = 2'-OMe modified nucleotide
  modified_base 5: mod_base = OTHER; note = 2'-OMe modified nucleotide
  modified_base 7: mod_base = OTHER; note = 2'-OMe modified nucleotide
  modified_base 9: mod_base = OTHER; note = 2'-OMe modified nucleotide
  modified_base 13: mod_base = OTHER; note = 2'-OMe modified nucleotide
  modified_base 15: mod_base = OTHER; note = 2'-OMe modified nucleotide
  modified_base 17: mod_base = OTHER; note = 2'-OMe modified nucleotide
  modified_base 19: mod_base = OTHER; note = 2'-OMe modified nucleotide
  modified_base 21: mod_base = OTHER; note = 2'-OMe modified nucleotide
  modified_base 4: mod_base = OTHER; note = 2-deoxy-2-fluoro ribonucleotide
  modified_base 6: mod_base = OTHER; note = 2-deoxy-2-fluoro ribonucleotide
  modified_base 8: mod_base = OTHER; note = 2-deoxy-2-fluoro ribonucleotide
  modified_base 10..12: mod_base = OTHER; note = 2-deoxy-2-fluoro ribonucleotide
  modified_base 14: mod_base = OTHER; note = 2-deoxy-2-fluoro ribonucleotide
  modified_base 16: mod_base = OTHER; note = 2-deoxy-2-fluoro ribonucleotide
  modified_base 18: mod_base = OTHER; note = 2-deoxy-2-fluoro ribonucleotide
  modified_base 20: mod_base = OTHER; note = 2-deoxy-2-fluoro ribonucleotide
  modified_base 22: mod_base = OTHER; note = 2-deoxy-2-fluoro ribonucleotide
  modified_base 23: mod_base = OTHER; note = Thymine
tatccatggatcccagtgtcaat

SEQ ID NO: 938 - RNA, 20 nt, synthetic construct
  source 1..20: mol_type = other RNA
  modified_base 20: mod_base = OTHER; note = inverted deoxyribonucleotide
  modified_base 2: mod_base = OTHER; note = 2'-OMe modified nucleotide
  modified_base 4: mod_base = OTHER; note = 2'-OMe modified nucleotide
  modified_base 6: mod_base = OTHER; note = 2'-OMe modified nucleotide
  modified_base 8: mod_base = OTHER; note = 2'-OMe modified nucleotide
  modified_base 10: mod_base = OTHER; note = 2'-OMe modified nucleotide
  modified_base 12: mod_base = OTHER; note = 2'-OMe modified nucleotide
  modified_base 14: mod_base = OTHER; note = 2'-OMe modified nucleotide
  modified_base 16: mod_base = OTHER; note = 2'-OMe modified nucleotide
  modified_base 18: mod_base = OTHER; note = 2'-OMe modified nucleotide
  modified_base 1: mod_base = OTHER; note = 2-deoxy-2-fluoro ribonucleotide
  modified_base 3: mod_base = OTHER; note = 2-deoxy-2-fluoro ribonucleotide
  modified_base 5: mod_base = OTHER; note = 2-deoxy-2-fluoro ribonucleotide
  modified_base 7..9: mod_base = OTHER; note = 2-deoxy-2-fluoro ribonucleotide
  modified_base 11: mod_base = OTHER; note = 2-deoxy-2-fluoro ribonucleotide
  modified_base 13: mod_base = OTHER; note = 2-deoxy-2-fluoro ribonucleotide
  modified_base 15: mod_base = OTHER; note = 2-deoxy-2-fluoro ribonucleotide
  modified_base 17: mod_base = OTHER; note = 2-deoxy-2-fluoro ribonucleotide
  modified_base 19: mod_base = OTHER; note = 2-deoxy-2-fluoro ribonucleotide
  modified_base 20: mod_base = OTHER; note = Thymine
tgtggcagccccttattgat

SEQ ID NO: 939 - RNA, 20 nt, synthetic construct
  source 1..20: mol_type = other RNA
  modified_base 20: mod_base = OTHER; note = inverted deoxyribonucleotide
  modified_base 2: mod_base = OTHER; note = 2'-OMe modified nucleotide
  modified_base 4: mod_base = OTHER; note = 2'-OMe modified nucleotide
  modified_base 6: mod_base = OTHER; note = 2'-OMe modified nucleotide
  modified_base 8: mod_base = OTHER; note = 2'-OMe modified nucleotide
  modified_base 10: mod_base = OTHER; note = 2'-OMe modified nucleotide
  modified_base 12: mod_base = OTHER; note = 2'-OMe modified nucleotide
  modified_base 14: mod_base = OTHER; note = 2'-OMe modified nucleotide
  modified_base 16: mod_base = OTHER; note = 2'-OMe modified nucleotide
  modified_base 18: mod_base = OTHER; note = 2'-OMe modified nucleotide
  modified_base 1: mod_base = OTHER; note = 2-deoxy-2-fluoro ribonucleotide
  modified_base 3: mod_base = OTHER; note = 2-deoxy-2-fluoro ribonucleotide
  modified_base 5: mod_base = OTHER; note = 2-deoxy-2-fluoro ribonucleotide
  modified_base 7..9: mod_base = OTHER; note = 2-deoxy-2-fluoro ribonucleotide
  modified_base 11: mod_base = OTHER; note = 2-deoxy-2-fluoro ribonucleotide
  modified_base 13: mod_base = OTHER; note = 2-deoxy-2-fluoro ribonucleotide
  modified_base 15: mod_base = OTHER; note = 2-deoxy-2-fluoro ribonucleotide
  modified_base 17: mod_base = OTHER; note = 2-deoxy-2-fluoro ribonucleotide
  modified_base 19: mod_base = OTHER; note = 2-deoxy-2-fluoro ribonucleotide
  modified_base 20: mod_base = OTHER; note = Thymine
cacaatgctcagacgcagat

SEQ ID NO: 940 - RNA, 20 nt, synthetic construct
  source 1..20: mol_type = other RNA
  modified_base 20: mod_base = OTHER; note = inverted deoxyribonucleotide
  modified_base 2: mod_base = OTHER; note = 2'-OMe modified nucleotide
  modified_base 4: mod_base = OTHER; note = 2'-OMe modified nucleotide
  modified_base 6: mod_base = OTHER; note = 2'-OMe modified nucleotide
  modified_base 8: mod_base = OTHER; note = 2'-OMe modified nucleotide
  modified_base 10: mod_base = OTHER; note = 2'-OMe modified nucleotide
  modified_base 12: mod_base = OTHER; note = 2'-OMe modified nucleotide
  modified_base 14: mod_base = OTHER; note = 2'-OMe modified nucleotide
  modified_base 16: mod_base = OTHER; note = 2'-OMe modified nucleotide
  modified_base 18: mod_base = OTHER; note = 2'-OMe modified nucleotide
  modified_base 1: mod_base = OTHER; note = 2-deoxy-2-fluoro ribonucleotide
  modified_base 3: mod_base = OTHER; note = 2-deoxy-2-fluoro ribonucleotide
  modified_base 5: mod_base = OTHER; note = 2-deoxy-2-fluoro ribonucleotide
  modified_base 7..9: mod_base = OTHER; note = 2-deoxy-2-fluoro ribonucleotide
  modified_base 11: mod_base = OTHER; note = 2-deoxy-2-fluoro ribonucleotide
  modified_base 13: mod_base = OTHER; note = 2-deoxy-2-fluoro ribonucleotide
  modified_base 15: mod_base = OTHER; note = 2-deoxy-2-fluoro ribonucleotide
  modified_base 17: mod_base = OTHER; note = 2-deoxy-2-fluoro ribonucleotide
  modified_base 19: mod_base = OTHER; note = 2-deoxy-2-fluoro ribonucleotide
  modified_base 20: mod_base = OTHER; note = Thymine
ccgaaatccagatcctgtat

SEQ ID NO: 941 - RNA, 20 nt, synthetic construct
  source 1..20: mol_type = other RNA
  modified_base 20: mod_base = OTHER; note = inverted deoxyribonucleotide
  modified_base 2: mod_base = OTHER; note = 2'-OMe modified nucleotide
  modified_base 4: mod_base = OTHER; note = 2'-OMe modified nucleotide
  modified_base 6: mod_base = OTHER; note = 2'-OMe modified nucleotide
  modified_base 8: mod_base = OTHER; note = 2'-OMe modified nucleotide
  modified_base 10: mod_base = OTHER; note = 2'-OMe modified nucleotide
  modified_base 12: mod_base = OTHER; note = 2'-OMe modified nucleotide
  modified_base 14: mod_base = OTHER; note = 2'-OMe modified nucleotide
  modified_base 16: mod_base = OTHER; note = 2'-OMe modified nucleotide
  modified_base 18: mod_base = OTHER; note = 2'-OMe modified nucleotide
  modified_base 1: mod_base = OTHER; note = 2-deoxy-2-fluoro ribonucleotide
  modified_base 3: mod_base = OTHER; note = 2-deoxy-2-fluoro ribonucleotide
  modified_base 5: mod_base = OTHER; note = 2-deoxy-2-fluoro ribonucleotide
  modified_base 7..9: mod_base = OTHER; note = 2-deoxy-2-fluoro ribonucleotide
  modified_base 11: mod_base = OTHER; note = 2-deoxy-2-fluoro ribonucleotide
  modified_base 13: mod_base = OTHER; note = 2-deoxy-2-fluoro ribonucleotide
  modified_base 15: mod_base = OTHER; note = 2-deoxy-2-fluoro ribonucleotide
  modified_base 17: mod_base = OTHER; note = 2-deoxy-2-fluoro ribonucleotide
  modified_base 19: mod_base = OTHER; note = 2-deoxy-2-fluoro ribonucleotide
  modified_base 20: mod_base = OTHER; note = Thymine
gactgaggaaacccccggat

SEQ ID NO: 942 - RNA, 20 nt, synthetic construct
  source 1..20: mol_type = other RNA
  modified_base 20: mod_base = OTHER; note = inverted deoxyribonucleotide
  modified_base 2: mod_base = OTHER; note = 2'-OMe modified nucleotide
  modified_base 4: mod_base = OTHER; note = 2'-OMe modified nucleotide
  modified_base 6: mod_base = OTHER; note = 2'-OMe modified nucleotide
  modified_base 8: mod_base = OTHER; note = 2'-OMe modified nucleotide
  modified_base 10: mod_base = OTHER; note = 2'-OMe modified nucleotide
  modified_base 12: mod_base = OTHER; note = 2'-OMe modified nucleotide
  modified_base 14: mod_base = OTHER; note = 2'-OMe modified nucleotide
  modified_base 16: mod_base = OTHER; note = 2'-OMe modified nucleotide
  modified_base 18: mod_base = OTHER; note = 2'-OMe modified nucleotide
  modified_base 1: mod_base = OTHER; note = 2-deoxy-2-fluoro ribonucleotide
  modified_base 3: mod_base = OTHER; note = 2-deoxy-2-fluoro ribonucleotide
  modified_base 5: mod_base = OTHER; note = 2-deoxy-2-fluoro ribonucleotide
  modified_base 7..9: mod_base = OTHER; note = 2-deoxy-2-fluoro ribonucleotide
  modified_base 11: mod_base = OTHER; note = 2-deoxy-2-fluoro ribonucleotide
  modified_base 13: mod_base = OTHER; note = 2-deoxy-2-fluoro ribonucleotide
  modified_base 15: mod_base = OTHER; note = 2-deoxy-2-fluoro ribonucleotide
  modified_base 17: mod_base = OTHER; note = 2-deoxy-2-fluoro ribonucleotide
  modified_base 19: mod_base = OTHER; note = 2-deoxy-2-fluoro ribonucleotide
  modified_base 20: mod_base = OTHER; note = Thymine
ctactaccattatggacaat

SEQ ID NO: 943 - RNA, 20 nt, synthetic construct
  source 1..20: mol_type = other RNA
  modified_base 20: mod_base = OTHER; note = inverted deoxyribonucleotide
  modified_base 2: mod_base = OTHER; note = 2'-OMe modified nucleotide
  modified_base 4: mod_base = OTHER; note = 2'-OMe modified nucleotide
  modified_base 6: mod_base = OTHER; note = 2'-OMe modified nucleotide
  modified_base 8: mod_base = OTHER; note = 2'-OMe modified nucleotide
  modified_base 10: mod_base = OTHER; note = 2'-OMe modified nucleotide
  modified_base 12: mod_base = OTHER; note = 2'-OMe modified nucleotide
  modified_base 14: mod_base = OTHER; note = 2'-OMe modified nucleotide
  modified_base 16: mod_base = OTHER; note = 2'-OMe modified nucleotide
  modified_base 18: mod_base = OTHER; note = 2'-OMe modified nucleotide
  modified_base 1: mod_base = OTHER; note = 2-deoxy-2-fluoro ribonucleotide
  modified_base 3: mod_base = OTHER; note = 2-deoxy-2-fluoro ribonucleotide
  modified_base 5: mod_base = OTHER; note = 2-deoxy-2-fluoro ribonucleotide
  modified_base 7..9: mod_base = OTHER; note = 2-deoxy-2-fluoro ribonucleotide
  modified_base 11: mod_base = OTHER; note = 2-deoxy-2-fluoro ribonucleotide
  modified_base 13: mod_base = OTHER; note = 2-deoxy-2-fluoro ribonucleotide
  modified_base 15: mod_base = OTHER; note = 2-deoxy-2-fluoro ribonucleotide
  modified_base 17: mod_base = OTHER; note = 2-deoxy-2-fluoro ribonucleotide
  modified_base 19: mod_base = OTHER; note = 2-deoxy-2-fluoro ribonucleotide
  modified_base 20: mod_base = OTHER; note = Thymine
actaccattatggacagaat

SEQ ID NO: 944 - RNA, 20 nt, synthetic construct
  source 1..20: mol_type = other RNA
  modified_base 20: mod_base = OTHER; note = inverted deoxyribonucleotide
  modified_base 2: mod_base = OTHER; note = 2'-OMe modified nucleotide
  modified_base 4: mod_base = OTHER; note = 2'-OMe modified nucleotide
  modified_base 6: mod_base = OTHER; note = 2'-OMe modified nucleotide
  modified_base 8: mod_base = OTHER; note = 2'-OMe modified nucleotide
  modified_base 10: mod_base = OTHER; note = 2'-OMe modified nucleotide
  modified_base 12: mod_base = OTHER; note = 2'-OMe modified nucleotide
  modified_base 14: mod_base = OTHER; note = 2'-OMe modified nucleotide
  modified_base 16: mod_base = OTHER; note = 2'-OMe modified nucleotide
  modified_base 18: mod_base = OTHER; note = 2'-OMe modified nucleotide
  modified_base 1: mod_base = OTHER; note = 2-deoxy-2-fluoro ribonucleotide
  modified_base 3: mod_base = OTHER; note = 2-deoxy-2-fluoro ribonucleotide
  modified_base 5: mod_base = OTHER; note = 2-deoxy-2-fluoro ribonucleotide
  modified_base 7..9: mod_base = OTHER; note = 2-deoxy-2-fluoro ribonucleotide
  modified_base 11: mod_base = OTHER; note = 2-deoxy-2-fluoro ribonucleotide
  modified_base 13: mod_base = OTHER; note = 2-deoxy-2-fluoro ribonucleotide
  modified_base 15: mod_base = OTHER; note = 2-deoxy-2-fluoro ribonucleotide
  modified_base 17: mod_base = OTHER; note = 2-deoxy-2-fluoro ribonucleotide
  modified_base 19: mod_base = OTHER; note = 2-deoxy-2-fluoro ribonucleotide
  modified_base 20: mod_base = OTHER; note = Thymine
taccattatggacagagtat

SEQ ID NO: 945 - RNA, 20 nt, synthetic construct
  source 1..20: mol_type = other RNA
  modified_base 20: mod_base = OTHER; note = inverted deoxyribonucleotide
  modified_base 2: mod_base = OTHER; note = 2'-OMe modified nucleotide
  modified_base 4: mod_base = OTHER; note = 2'-OMe modified nucleotide
  modified_base 6: mod_base = OTHER; note = 2'-OMe modified nucleotide
  modified_base 8: mod_base = OTHER; note = 2'-OMe modified nucleotide
  modified_base 10: mod_base = OTHER; note = 2'-OMe modified nucleotide
  modified_base 12: mod_base = OTHER; note = 2'-OMe modified nucleotide
  modified_base 14: mod_base = OTHER; note = 2'-OMe modified nucleotide
  modified_base 16: mod_base = OTHER; note = 2'-OMe modified nucleotide
  modified_base 18: mod_base = OTHER; note = 2'-OMe modified nucleotide
  modified_base 1: mod_base = OTHER; note = 2-deoxy-2-fluoro ribonucleotide
  modified_base 3: mod_base = OTHER; note = 2-deoxy-2-fluoro ribonucleotide
  modified_base 5: mod_base = OTHER; note = 2-deoxy-2-fluoro ribonucleotide
  modified_base 7..9: mod_base = OTHER; note = 2-deoxy-2-fluoro ribonucleotide
  modified_base 11: mod_base = OTHER; note = 2-deoxy-2-fluoro ribonucleotide
  modified_base 13: mod_base = OTHER; note = 2-deoxy-2-fluoro ribonucleotide
  modified_base 15: mod_base = OTHER; note = 2-deoxy-2-fluoro ribonucleotide
  modified_base 17: mod_base = OTHER; note = 2-deoxy-2-fluoro ribonucleotide
  modified_base 19: mod_base = OTHER; note = 2-deoxy-2-fluoro ribonucleotide
  modified_base 20: mod_base = OTHER; note = Thymine
accattatggacagagttat

SEQ ID NO: 946 - RNA, 20 nt, synthetic construct
  source 1..20: mol_type = other RNA
  modified_base 20: mod_base = OTHER; note = inverted deoxyribonucleotide
  modified_base 2: mod_base = OTHER; note = 2'-OMe modified nucleotide
  modified_base 4: mod_base = OTHER; note = 2'-OMe modified nucleotide
  modified_base 6: mod_base = OTHER; note = 2'-OMe modified nucleotide
  modified_base 8: mod_base = OTHER; note = 2'-OMe modified nucleotide
  modified_base 10: mod_base = OTHER; note = 2'-OMe modified nucleotide
  modified_base 12: mod_base = OTHER; note = 2'-OMe modified nucleotide
  modified_base 14: mod_base = OTHER; note = 2'-OMe modified nucleotide
  modified_base 16: mod_base = OTHER; note = 2'-OMe modified nucleotide
  modified_base 18: mod_base = OTHER; note = 2'-OMe modified nucleotide
  modified_base 1: mod_base = OTHER; note = 2-deoxy-2-fluoro ribonucleotide
  modified_base 3: mod_base = OTHER; note = 2-deoxy-2-fluoro ribonucleotide
  modified_base 5: mod_base = OTHER; note = 2-deoxy-2-fluoro ribonucleotide
  modified_base 7..9: mod_base = OTHER; note = 2-deoxy-2-fluoro ribonucleotide
  modified_base 11: mod_base = OTHER; note = 2-deoxy-2-fluoro ribonucleotide
  modified_base 13: mod_base = OTHER; note = 2-deoxy-2-fluoro ribonucleotide
  modified_base 15: mod_base = OTHER; note = 2-deoxy-2-fluoro ribonucleotide
  modified_base 17: mod_base = OTHER; note = 2-deoxy-2-fluoro ribonucleotide
  modified_base 19: mod_base = OTHER; note = 2-deoxy-2-fluoro ribonucleotide
  modified_base 20: mod_base = OTHER; note = Thymine
agatgctgagattcgcccat

SEQ ID NO: 947 - RNA, 20 nt, synthetic construct
  source 1..20: mol_type = other RNA
  modified_base 20: mod_base = OTHER; note = inverted deoxyribonucleotide
  modified_base 2: mod_base = OTHER; note = 2'-OMe modified nucleotide
  modified_base 4: mod_base = OTHER; note = 2'-OMe modified nucleotide
  modified_base 6: mod_base = OTHER; note = 2'-OMe modified nucleotide
  modified_base 8: mod_base = OTHER; note = 2'-OMe modified nucleotide
  modified_base 10: mod_base = OTHER; note = 2'-OMe modified nucleotide
  modified_base 12: mod_base = OTHER; note = 2'-OMe modified nucleotide
  modified_base 14: mod_base = OTHER; note = 2'-OMe modified nucleotide
  modified_base 16: mod_base = OTHER; note = 2'-OMe modified nucleotide
  modified_base 18: mod_base = OTHER; note = 2'-OMe modified nucleotide
  modified_base 1: mod_base = OTHER; note = 2-deoxy-2-fluoro ribonucleotide
  modified_base 3: mod_base = OTHER; note = 2-deoxy-2-fluoro ribonucleotide
  modified_base 5: mod_base = OTHER; note = 2-deoxy-2-fluoro ribonucleotide
  modified_base 7..9: mod_base = OTHER; note = 2-deoxy-2-fluoro ribonucleotide
  modified_base 11: mod_base = OTHER; note = 2-deoxy-2-fluoro ribonucleotide
  modified_base 13: mod_base = OTHER; note = 2-deoxy-2-fluoro ribonucleotide
  modified_base 15: mod_base = OTHER; note = 2-deoxy-2-fluoro ribonucleotide
  modified_base 17: mod_base = OTHER; note = 2-deoxy-2-fluoro ribonucleotide
  modified_base 19: mod_base = OTHER; note = 2-deoxy-2-fluoro ribonucleotide
  modified_base 20: mod_base = OTHER; note = Thymine
gatgctgagattcgccctat

SEQ ID NO: 948 - RNA, 20 nt, synthetic construct
  source 1..20: mol_type = other RNA
  modified_base 20: mod_base = OTHER; note = inverted deoxyribonucleotide
  modified_base 2: mod_base = OTHER; note = 2'-OMe modified nucleotide
  modified_base 4: mod_base = OTHER; note = 2'-OMe modified nucleotide
  modified_base 6: mod_base = OTHER; note = 2'-OMe modified nucleotide
  modified_base 8: mod_base = OTHER; note = 2'-OMe modified nucleotide
  modified_base 10: mod_base = OTHER; note = 2'-OMe modified nucleotide
  modified_base 12: mod_base = OTHER; note = 2'-OMe modified nucleotide
  modified_base 14: mod_base = OTHER; note = 2'-OMe modified nucleotide
  modified_base 16: mod_base = OTHER; note = 2'-OMe modified nucleotide
  modified_base 18: mod_base = OTHER; note = 2'-OMe modified nucleotide
  modified_base 1: mod_base = OTHER; note = 2-deoxy-2-fluoro ribonucleotide
  modified_base 3: mod_base = OTHER; note = 2-deoxy-2-fluoro ribonucleotide
  modified_base 5: mod_base = OTHER; note = 2-deoxy-2-fluoro ribonucleotide
  modified_base 7..9: mod_base = OTHER; note = 2-deoxy-2-fluoro ribonucleotide
  modified_base 11: mod_base = OTHER; note = 2-deoxy-2-fluoro ribonucleotide
  modified_base 13: mod_base = OTHER; note = 2-deoxy-2-fluoro ribonucleotide
  modified_base 15: mod_base = OTHER; note = 2-deoxy-2-fluoro ribonucleotide
  modified_base 17: mod_base = OTHER; note = 2-deoxy-2-fluoro ribonucleotide
  modified_base 19: mod_base = OTHER; note = 2-deoxy-2-fluoro ribonucleotide
  modified_base 20: mod_base = OTHER; note = Thymine
agattcgcccttggtgttat

SEQ ID NO: 949 - RNA, 20 nt, synthetic construct
  source 1..20: mol_type = other RNA
  modified_base 20: mod_base = OTHER; note = inverted deoxyribonucleotide
  modified_base 2: mod_base = OTHER; note = 2'-OMe modified nucleotide
  modified_base 4: mod_base = OTHER; note = 2'-OMe modified nucleotide
  modified_base 6: mod_base = OTHER; note = 2'-OMe modified nucleotide
  modified_base 8: mod_base = OTHER; note = 2'-OMe modified nucleotide
  modified_base 10: mod_base = OTHER; note = 2'-OMe modified nucleotide
  modified_base 12: mod_base = OTHER; note = 2'-OMe modified nucleotide
  modified_base 14: mod_base = OTHER; note = 2'-OMe modified nucleotide
  modified_base 16: mod_base = OTHER; note = 2'-OMe modified nucleotide
  modified_base 18: mod_base = OTHER; note = 2'-OMe modified nucleotide
  modified_base 1: mod_base = OTHER; note = 2-deoxy-2-fluoro ribonucleotide
  modified_base 3: mod_base = OTHER; note = 2-deoxy-2-fluoro ribonucleotide
  modified_base 5: mod_base = OTHER; note = 2-deoxy-2-fluoro ribonucleotide
  modified_base 7..9: mod_base = OTHER; note = 2-deoxy-2-fluoro ribonucleotide
  modified_base 11: mod_base = OTHER; note = 2-deoxy-2-fluoro ribonucleotide
  modified_base 13: mod_base = OTHER; note = 2-deoxy-2-fluoro ribonucleotide
  modified_base 15: mod_base = OTHER; note = 2-deoxy-2-fluoro ribonucleotide
  modified_base 17: mod_base = OTHER; note = 2-deoxy-2-fluoro ribonucleotide
  modified_base 19: mod_base = OTHER; note = 2-deoxy-2-fluoro ribonucleotide
  modified_base 20: mod_base = OTHER; note = Thymine
gacagaatcaagtgtcctat

SEQ ID NO: 950 - RNA, 20 nt, synthetic construct
  source 1..20: mol_type = other RNA
  modified_base 20: mod_base = OTHER; note = inverted deoxyribonucleotide
  modified_base 2: mod_base = OTHER; note = 2'-OMe modified nucleotide
  modified_base 4: mod_base = OTHER; note = 2'-OMe modified nucleotide
  modified_base 6: mod_base = OTHER; note = 2'-OMe modified nucleotide
  modified_base 8: mod_base = OTHER; note = 2'-OMe modified nucleotide
  modified_base 10: mod_base = OTHER; note = 2'-OMe modified nucleotide
  modified_base 12: mod_base = OTHER; note = 2'-OMe modified nucleotide
  modified_base 14: mod_base = OTHER; note = 2'-OMe modified nucleotide
  modified_base 16: mod_base = OTHER; note = 2'-OMe modified nucleotide
  modified_base 18: mod_base = OTHER; note = 2'-OMe modified nucleotide
  modified_base 1: mod_base = OTHER; note = 2-deoxy-2-fluoro ribonucleotide
  modified_base 3: mod_base = OTHER; note = 2-deoxy-2-fluoro ribonucleotide
  modified_base 5: mod_base = OTHER; note = 2-deoxy-2-fluoro ribonucleotide
  modified_base 7..9: mod_base = OTHER; note = 2-deoxy-2-fluoro ribonucleotide
  modified_base 11: mod_base = OTHER; note = 2-deoxy-2-fluoro ribonucleotide
  modified_base 13: mod_base = OTHER; note = 2-deoxy-2-fluoro ribonucleotide
  modified_base 15: mod_base = OTHER; note = 2-deoxy-2-fluoro ribonucleotide
  modified_base 17: mod_base = OTHER; note = 2-deoxy-2-fluoro ribonucleotide
  modified_base 19: mod_base = OTHER; note = 2-deoxy-2-fluoro ribonucleotide
  modified_base 20: mod_base = OTHER; note = Thymine
acatgtcagtcttggtccat

SEQ ID NO: 951 - RNA, 20 nt, synthetic construct
  source 1..20: mol_type = other RNA
  modified_base 20: mod_base = OTHER; note = inverted deoxyribonucleotide
  modified_base 2: mod_base = OTHER; note = 2'-OMe modified nucleotide
  modified_base 4: mod_base = OTHER; note = 2'-OMe modified nucleotide
  modified_base 6: mod_base = OTHER; note = 2'-OMe modified nucleotide
  modified_base 8: mod_base = OTHER; note = 2'-OMe modified nucleotide
  modified_base 10: mod_base = OTHER; note = 2'-OMe modified nucleotide
  modified_base 12: mod_base = OTHER; note = 2'-OMe modified nucleotide
  modified_base 14: mod_base = OTHER; note = 2'-OMe modified nucleotide
  modified_base 16: mod_base = OTHER; note = 2'-OMe modified nucleotide
  modified_base 18: mod_base = OTHER; note = 2'-OMe modified nucleotide
  modified_base 1: mod_base = OTHER; note = 2-deoxy-2-fluoro ribonucleotide
  modified_base 3: mod_base = OTHER; note = 2-deoxy-2-fluoro ribonucleotide
  modified_base 5: mod_base = OTHER; note = 2-deoxy-2-fluoro ribonucleotide
  modified_base 7..9: mod_base = OTHER; note = 2-deoxy-2-fluoro ribonucleotide
  modified_base 11: mod_base = OTHER; note = 2-deoxy-2-fluoro ribonucleotide
  modified_base 13: mod_base = OTHER; note = 2-deoxy-2-fluoro ribonucleotide
  modified_base 15: mod_base = OTHER; note = 2-deoxy-2-fluoro ribonucleotide
  modified_base 17: mod_base = OTHER; note = 2-deoxy-2-fluoro ribonucleotide
  modified_base 19: mod_base = OTHER; note = 2-deoxy-2-fluoro ribonucleotide
  modified_base 20: mod_base = OTHER; note = Thymine
ccaaatggtggcctgaccat

SEQ ID NO: 952 - RNA, 20 nt, synthetic construct
  source 1..20: mol_type = other RNA
  modified_base 20: mod_base = OTHER; note = inverted deoxyribonucleotide
  modified_base 2: mod_base = OTHER; note = 2'-OMe modified nucleotide
  modified_base 4: mod_base = OTHER; note = 2'-OMe modified nucleotide
  modified_base 6: mod_base = OTHER; note = 2'-OMe modified nucleotide
  modified_base 8: mod_base = OTHER; note = 2'-OMe modified nucleotide
  modified_base 10: mod_base = OTHER; note = 2'-OMe modified nucleotide
  modified_base 12: mod_base = OTHER; note = 2'-OMe modified nucleotide
  modified_base 14: mod_base = OTHER; note = 2'-OMe modified nucleotide
  modified_base 16: mod_base = OTHER; note = 2'-OMe modified nucleotide
  modified_base 18: mod_base = OTHER; note = 2'-OMe modified nucleotide
  modified_base 1: mod_base = OTHER; note = 2-deoxy-2-fluoro ribonucleotide
  modified_base 3: mod_base = OTHER; note = 2-deoxy-2-fluoro ribonucleotide
  modified_base 5: mod_base = OTHER; note = 2-deoxy-2-fluoro ribonucleotide
  modified_base 7..9: mod_base = OTHER; note = 2-deoxy-2-fluoro ribonucleotide
  modified_base 11: mod_base = OTHER; note = 2-deoxy-2-fluoro ribonucleotide
  modified_base 13: mod_base = OTHER; note = 2-deoxy-2-fluoro ribonucleotide
  modified_base 15: mod_base = OTHER; note = 2-deoxy-2-fluoro ribonucleotide
  modified_base 17: mod_base = OTHER; note = 2-deoxy-2-fluoro ribonucleotide
  modified_base 19: mod_base = OTHER; note = 2-deoxy-2-fluoro ribonucleotide
  modified_base 20: mod_base = OTHER; note = Thymine
tggtgttataccatggatat

SEQ ID NO: 953 - RNA, 20 nt, synthetic construct
  source 1..20: mol_type = other RNA
  modified_base 20: mod_base = OTHER; note = inverted deoxyribonucleotide
  modified_base 2: mod_base = OTHER; note = 2'-OMe modified nucleotide
  modified_base 4: mod_base = OTHER; note = 2'-OMe modified nucleotide
  modified_base 6: mod_base = OTHER; note = 2'-OMe modified nucleotide
  modified_base 8: mod_base = OTHER; note = 2'-OMe modified nucleotide
  modified_base 10: mod_base = OTHER; note = 2'-OMe modified nucleotide
  modified_base 12: mod_base = OTHER; note = 2'-OMe modified nucleotide
  modified_base 14: mod_base = OTHER; note = 2'-OMe modified nucleotide
  modified_base 16: mod_base = OTHER; note = 2'-OMe modified nucleotide
  modified_base 18: mod_base = OTHER; note = 2'-OMe modified nucleotide
  modified_base 1: mod_base = OTHER; note = 2-deoxy-2-fluoro ribonucleotide
  modified_base 3: mod_base = OTHER; note = 2-deoxy-2-fluoro ribonucleotide
  modified_base 5: mod_base = OTHER; note = 2-deoxy-2-fluoro ribonucleotide
  modified_base 7..9: mod_base = OTHER; note = 2-deoxy-2-fluoro ribonucleotide
  modified_base 11: mod_base = OTHER; note = 2-deoxy-2-fluoro ribonucleotide
  modified_base 13: mod_base = OTHER; note = 2-deoxy-2-fluoro ribonucleotide
  modified_base 15: mod_base = OTHER; note = 2-deoxy-2-fluoro ribonucleotide
  modified_base 17: mod_base = OTHER; note = 2-deoxy-2-fluoro ribonucleotide
  modified_base 19: mod_base = OTHER; note = 2-deoxy-2-fluoro ribonucleotide
  modified_base 20: mod_base = OTHER; note = Thymine
tgttataccatggatcccat

SEQ ID NO: 954 - RNA, 20 nt, synthetic construct
  source 1..20: mol_type = other RNA
  modified_base 20: mod_base = OTHER; note = inverted deoxyribonucleotide
  modified_base 2: mod_base = OTHER; note = 2'-OMe modified nucleotide
  modified_base 4: mod_base = OTHER; note = 2'-OMe modified nucleotide
  modified_base 6: mod_base = OTHER; note = 2'-OMe modified nucleotide
  modified_base 8: mod_base = OTHER; note = 2'-OMe modified nucleotide
  modified_base 10: mod_base = OTHER; note = 2'-OMe modified nucleotide
  modified_base 12: mod_base = OTHER; note = 2'-OMe modified nucleotide
  modified_base 14: mod_base = OTHER; note = 2'-OMe modified nucleotide
  modified_base 16: mod_base = OTHER; note = 2'-OMe modified nucleotide
  modified_base 18: mod_base = OTHER; note = 2'-OMe modified nucleotide
  modified_base 1: mod_base = OTHER; note = 2-deoxy-2-fluoro ribonucleotide
  modified_base 3: mod_base = OTHER; note = 2-deoxy-2-fluoro ribonucleotide
  modified_base 5: mod_base = OTHER; note = 2-deoxy-2-fluoro ribonucleotide
  modified_base 7..9: mod_base = OTHER; note = 2-deoxy-2-fluoro ribonucleotide
  modified_base 11: mod_base = OTHER; note = 2-deoxy-2-fluoro ribonucleotide
  modified_base 13: mod_base = OTHER; note = 2-deoxy-2-fluoro ribonucleotide
  modified_base 15: mod_base = OTHER; note = 2-deoxy-2-fluoro ribonucleotide
  modified_base 17: mod_base = OTHER; note = 2-deoxy-2-fluoro ribonucleotide
  modified_base 19: mod_base = OTHER; note = 2-deoxy-2-fluoro ribonucleotide
  modified_base 20: mod_base = OTHER; note = Thymine
aacctgacacaatgtccaat

SEQ ID NO: 955 - RNA, 20 nt, synthetic construct
  source 1..20: mol_type = other RNA
  modified_base 20: mod_base = OTHER; note = inverted deoxyribonucleotide
  modified_base 2: mod_base = OTHER; note = 2'-OMe modified nucleotide
  modified_base 4: mod_base = OTHER; note = 2'-OMe modified nucleotide
  modified_base 6: mod_base = OTHER; note = 2'-OMe modified nucleotide
  modified_base 8: mod_base = OTHER; note = 2'-OMe modified nucleotide
  modified_base 10: mod_base = OTHER; note = 2'-OMe modified nucleotide
  modified_base 12: mod_base = OTHER; note = 2'-OMe modified nucleotide
  modified_base 14: mod_base = OTHER; note = 2'-OMe modified nucleotide
  modified_base 16: mod_base = OTHER; note = 2'-OMe modified nucleotide
  modified_base 18: mod_base = OTHER; note = 2'-OMe modified nucleotide
  modified_base 1: mod_base = OTHER; note = 2-deoxy-2-fluoro ribonucleotide
  modified_base 3: mod_base = OTHER; note = 2-deoxy-2-fluoro ribonucleotide
  modified_base 5: mod_base = OTHER; note = 2-deoxy-2-fluoro ribonucleotide
  modified_base 7..9: mod_base = OTHER; note = 2-deoxy-2-fluoro ribonucleotide
  modified_base 11: mod_base = OTHER; note = 2-deoxy-2-fluoro ribonucleotide
  modified_base 13: mod_base = OTHER; note = 2-deoxy-2-fluoro ribonucleotide
  modified_base 15: mod_base = OTHER; note = 2-deoxy-2-fluoro ribonucleotide
  modified_base 17: mod_base = OTHER; note = 2-deoxy-2-fluoro ribonucleotide
  modified_base 19: mod_base = OTHER; note = 2-deoxy-2-fluoro ribonucleotide
  modified_base 20: mod_base = OTHER; note = Thymine
aatgtccagtgacagaatat

SEQ ID NO: 956 - RNA, 20 nt, synthetic construct
  source 1..20: mol_type = other RNA
  modified_base 20: mod_base = OTHER; note = inverted deoxyribonucleotide
  modified_base 2: mod_base = OTHER; note = 2'-OMe modified nucleotide
  modified_base 4: mod_base = OTHER; note = 2'-OMe modified nucleotide
  modified_base 6: mod_base = OTHER; note = 2'-OMe modified nucleotide
  modified_base 8: mod_base = OTHER; note = 2'-OMe modified nucleotide
  modified_base 10: mod_base = OTHER; note = 2'-OMe modified nucleotide
  modified_base 12: mod_base = OTHER; note = 2'-OMe modified nucleotide
  modified_base 14: mod_base = OTHER; note = 2'-OMe modified nucleotide
  modified_base 16: mod_base = OTHER; note = 2'-OMe modified nucleotide
  modified_base 18: mod_base = OTHER; note = 2'-OMe modified nucleotide
  modified_base 1: mod_base = OTHER; note = 2-deoxy-2-fluoro ribonucleotide
  modified_base 3: mod_base = OTHER; note = 2-deoxy-2-fluoro ribonucleotide
  modified_base 5: mod_base = OTHER; note = 2-deoxy-2-fluoro ribonucleotide
  modified_base 7..9: mod_base = OTHER; note = 2-deoxy-2-fluoro ribonucleotide
  modified_base 11: mod_base = OTHER; note = 2-deoxy-2-fluoro ribonucleotide
  modified_base 13: mod_base = OTHER; note = 2-deoxy-2-fluoro ribonucleotide
  modified_base 15: mod_base = OTHER; note = 2-deoxy-2-fluoro ribonucleotide
  modified_base 17: mod_base = OTHER; note = 2-deoxy-2-fluoro ribonucleotide
  modified_base 19: mod_base = OTHER; note = 2-deoxy-2-fluoro ribonucleotide
  modified_base 20: mod_base = OTHER; note = Thymine
tgtttctgaacaagcaccat

SEQ ID NO: 957 - RNA, 20 nt, synthetic construct
  source 1..20: mol_type = other RNA
  modified_base 20: mod_base = OTHER; note = inverted deoxyribonucleotide
  modified_base 2: mod_base = OTHER; note = 2'-OMe modified nucleotide
  modified_base 4: mod_base = OTHER; note = 2'-OMe modified nucleotide
  modified_base 6: mod_base = OTHER; note = 2'-OMe modified nucleotide
  modified_base 8: mod_base = OTHER; note = 2'-OMe modified nucleotide
  modified_base 10: mod_base = OTHER; note = 2'-OMe modified nucleotide
  modified_base 12: mod_base = OTHER; note = 2'-OMe modified nucleotide
  modified_base 14: mod_base = OTHER; note = 2'-OMe modified nucleotide
  modified_base 16: mod_base = OTHER; note = 2'-OMe modified nucleotide
  modified_base 18: mod_base = OTHER; note = 2'-OMe modified nucleotide
  modified_base 1: mod_base = OTHER; note = 2-deoxy-2-fluoro ribonucleotide
  modified_base 3: mod_base = OTHER; note = 2-deoxy-2-fluoro ribonucleotide
  modified_base 5: mod_base = OTHER; note = 2-deoxy-2-fluoro ribonucleotide
  modified_base 7..9: mod_base = OTHER; note = 2-deoxy-2-fluoro ribonucleotide
  modified_base 11: mod_base = OTHER; note = 2-deoxy-2-fluoro ribonucleotide
  modified_base 13: mod_base = OTHER; note = 2-deoxy-2-fluoro ribonucleotide
  modified_base 15: mod_base = OTHER; note = 2-deoxy-2-fluoro ribonucleotide
  modified_base 17: mod_base = OTHER; note = 2-deoxy-2-fluoro ribonucleotide
  modified_base 19: mod_base = OTHER; note = 2-deoxy-2-fluoro ribonucleotide
  modified_base 20: mod_base = OTHER; note = Thymine
tatcgaggctcattctccat

SEQ ID NO: 958 - RNA, 20 nt, synthetic construct
  source 1..20: mol_type = other RNA
  modified_base 20: mod_base = OTHER; note = inverted deoxyribonucleotide
  modified_base 2: mod_base = OTHER; note = 2'-OMe modified nucleotide
  modified_base 4: mod_base = OTHER; note = 2'-OMe modified nucleotide
  modified_base 6: mod_base = OTHER; note = 2'-OMe modified nucleotide
  modified_base 8: mod_base = OTHER; note = 2'-OMe modified nucleotide
  modified_base 10: mod_base = OTHER; note = 2'-OMe modified nucleotide
  modified_base 12: mod_base = OTHER; note = 2'-OMe modified nucleotide
  modified_base 14: mod_base = OTHER; note = 2'-OMe modified nucleotide
  modified_base 16: mod_base = OTHER; note = 2'-OMe modified nucleotide
  modified_base 18: mod_base = OTHER; note = 2'-OMe modified nucleotide
  modified_base 1: mod_base = OTHER; note = 2-deoxy-2-fluoro ribonucleotide
  modified_base 3: mod_base = OTHER; note = 2-deoxy-2-fluoro ribonucleotide
  modified_base 5: mod_base = OTHER; note = 2-deoxy-2-fluoro ribonucleotide
  modified_base 7..9: mod_base = OTHER; note = 2-deoxy-2-fluoro ribonucleotide
  modified_base 11: mod_base = OTHER; note = 2-deoxy-2-fluoro ribonucleotide
  modified_base 13: mod_base = OTHER; note = 2-deoxy-2-fluoro ribonucleotide
  modified_base 15: mod_base = OTHER; note = 2-deoxy-2-fluoro ribonucleotide
  modified_base 17: mod_base = OTHER; note = 2-deoxy-2-fluoro ribonucleotide
  modified_base 19: mod_base = OTHER; note = 2-deoxy-2-fluoro ribonucleotide
  modified_base 20: mod_base = OTHER; note = Thymine
tcgaggctcattctccacat

SEQ ID NO: 959 - RNA, 20 nt, synthetic construct
  source 1..20: mol_type = other RNA
  modified_base 20: mod_base = OTHER; note = inverted deoxyribonucleotide
  modified_base 2: mod_base = OTHER; note = 2'-OMe modified nucleotide
  modified_base 4: mod_base = OTHER; note = 2'-OMe modified nucleotide
  modified_base 6: mod_base = OTHER; note = 2'-OMe modified nucleotide
  modified_base 8: mod_base = OTHER; note = 2'-OMe modified nucleotide
  modified_base 10: mod_base = OTHER; note = 2'-OMe modified nucleotide
  modified_base 12: mod_base = OTHER; note = 2'-OMe modified nucleotide
  modified_base 14: mod_base = OTHER; note = 2'-OMe modified nucleotide
  modified_base 16: mod_base = OTHER; note = 2'-OMe modified nucleotide
  modified_base 18: mod_base = OTHER; note = 2'-OMe modified nucleotide
  modified_base 1: mod_base = OTHER; note = 2-deoxy-2-fluoro ribonucleotide
  modified_base 3: mod_base = OTHER; note = 2-deoxy-2-fluoro ribonucleotide
  modified_base 5: mod_base = OTHER; note = 2-deoxy-2-fluoro ribonucleotide
  modified_base 7..9: mod_base = OTHER; note = 2-deoxy-2-fluoro ribonucleotide
  modified_base 11: mod_base = OTHER; note = 2-deoxy-2-fluoro ribonucleotide
  modified_base 13: mod_base = OTHER; note = 2-deoxy-2-fluoro ribonucleotide
  modified_base 15: mod_base = OTHER; note = 2-deoxy-2-fluoro ribonucleotide
  modified_base 17: mod_base = OTHER; note = 2-deoxy-2-fluoro ribonucleotide
  modified_base 19: mod_base = OTHER; note = 2-deoxy-2-fluoro ribonucleotide
  modified_base 20: mod_base = OTHER; note = Thymine
tcctcacaactcccacggat

SEQ ID NO: 960 - RNA, 20 nt, synthetic construct
  source 1..20: mol_type = other RNA
  modified_base 20: mod_base = OTHER; note = inverted deoxyribonucleotide
  modified_base 2: mod_base = OTHER; note = 2'-OMe modified nucleotide
  modified_base 4: mod_base = OTHER; note = 2'-OMe modified nucleotide
  modified_base 6: mod_base = OTHER; note = 2'-OMe modified nucleotide
  modified_base 8: mod_base = OTHER; note = 2'-OMe modified nucleotide
  modified_base 10: mod_base = OTHER; note = 2'-OMe modified nucleotide
  modified_base 12: mod_base = OTHER; note = 2'-OMe modified nucleotide
  modified_base 14: mod_base = OTHER; note = 2'-OMe modified nucleotide
  modified_base 16: mod_base = OTHER; note = 2'-OMe modified nucleotide
  modified_base 18: mod_base = OTHER; note = 2'-OMe modified nucleotide
  modified_base 1: mod_base = OTHER; note = 2-deoxy-2-fluoro ribonucleotide
  modified_base 3: mod_base = OTHER; note = 2-deoxy-2-fluoro ribonucleotide
  modified_base 5: mod_base = OTHER; note = 2-deoxy-2-fluoro ribonucleotide
  modified_base 7..9: mod_base = OTHER; note = 2-deoxy-2-fluoro ribonucleotide
  modified_base 11: mod_base = OTHER; note = 2-deoxy-2-fluoro ribonucleotide
  modified_base 13: mod_base = OTHER; note = 2-deoxy-2-fluoro ribonucleotide
  modified_base 15: mod_base = OTHER; note = 2-deoxy-2-fluoro ribonucleotide
  modified_base 17: mod_base = OTHER; note = 2-deoxy-2-fluoro ribonucleotide
  modified_base 19: mod_base = OTHER; note = 2-deoxy-2-fluoro ribonucleotide
  modified_base 20: mod_base = OTHER; note = Thymine
caactcccacggtggtccat

SEQ ID NO: 961 - RNA, 20 nt, synthetic construct
  source 1..20: mol_type = other RNA
  modified_base 20: mod_base = OTHER; note = inverted deoxyribonucleotide
  modified_base 2: mod_base = OTHER; note = 2'-OMe modified nucleotide
  modified_base 4: mod_base = OTHER; note = 2'-OMe modified nucleotide
  modified_base 6: mod_base = OTHER; note = 2'-OMe modified nucleotide
  modified_base 8: mod_base = OTHER; note = 2'-OMe modified nucleotide
  modified_base 10: mod_base = OTHER; note = 2'-OMe modified nucleotide
  modified_base 12: mod_base = OTHER; note = 2'-OMe modified nucleotide
  modified_base 14: mod_base = OTHER; note = 2'-OMe modified nucleotide
  modified_base 16: mod_base = OTHER; note = 2'-OMe modified nucleotide
  modified_base 18: mod_base = OTHER; note = 2'-OMe modified nucleotide
  modified_base 1: mod_base = OTHER; note = 2-deoxy-2-fluoro ribonucleotide
  modified_base 3: mod_base = OTHER; note = 2-deoxy-2-fluoro ribonucleotide
  modified_base 5: mod_base = OTHER; note = 2-deoxy-2-fluoro ribonucleotide
  modified_base 7..9: mod_base = OTHER; note = 2-deoxy-2-fluoro ribonucleotide
  modified_base 11: mod_base = OTHER; note = 2-deoxy-2-fluoro ribonucleotide
  modified_base 13: mod_base = OTHER; note = 2-deoxy-2-fluoro ribonucleotide
  modified_base 15: mod_base = OTHER; note = 2-deoxy-2-fluoro ribonucleotide
  modified_base 17: mod_base = OTHER; note = 2-deoxy-2-fluoro ribonucleotide
  modified_base 19: mod_base = OTHER; note = 2-deoxy-2-fluoro ribonucleotide
  modified_base 20: mod_base = OTHER; note = Thymine
gctccttctgaacaagcaat

SEQ ID NO: 962 - RNA, 20 nt, synthetic construct
  source 1..20: mol_type = other RNA
  modified_base 20: mod_base = OTHER; note = inverted deoxyribonucleotide
  modified_base 2: mod_base = OTHER; note = 2'-OMe modified nucleotide
  modified_base 4: mod_base = OTHER; note = 2'-OMe modified nucleotide
  modified_base 6: mod_base = OTHER; note = 2'-OMe modified nucleotide
  modified_base 8: mod_base = OTHER; note = 2'-OMe modified nucleotide
  modified_base 10: mod_base = OTHER; note = 2'-OMe modified nucleotide
  modified_base 12: mod_base = OTHER; note = 2'-OMe modified nucleotide
  modified_base 14: mod_base = OTHER; note = 2'-OMe modified nucleotide
  modified_base 16: mod_base = OTHER; note = 2'-OMe modified nucleotide
  modified_base 18: mod_base = OTHER; note = 2'-OMe modified nucleotide
  modified_base 1: mod_base = OTHER; note = 2-deoxy-2-fluoro ribonucleotide
  modified_base 3: mod_base = OTHER; note = 2-deoxy-2-fluoro ribonucleotide
  modified_base 5: mod_base = OTHER; note = 2-deoxy-2-fluoro ribonucleotide
  modified_base 7..9: mod_base = OTHER; note = 2-deoxy-2-fluoro ribonucleotide
  modified_base 11: mod_base = OTHER; note = 2-deoxy-2-fluoro ribonucleotide
  modified_base 13: mod_base = OTHER; note = 2-deoxy-2-fluoro ribonucleotide
  modified_base 15: mod_base = OTHER; note = 2-deoxy-2-fluoro ribonucleotide
  modified_base 17: mod_base = OTHER; note = 2-deoxy-2-fluoro ribonucleotide
  modified_base 19: mod_base = OTHER; note = 2-deoxy-2-fluoro ribonucleotide
  modified_base 20: mod_base = OTHER; note = Thymine
ataccacactggcatcagat

SEQ ID NO: 963 - RNA, 20 nt, synthetic construct
  source 1..20: mol_type = other RNA
  modified_base 20: mod_base = OTHER; note = inverted deoxyribonucleotide
  modified_base 2: mod_base = OTHER; note = 2'-OMe modified nucleotide
  modified_base 4: mod_base = OTHER; note = 2'-OMe modified nucleotide
  modified_base 6: mod_base = OTHER; note = 2'-OMe modified nucleotide
  modified_base 8: mod_base = OTHER; note = 2'-OMe modified nucleotide
  modified_base 10: mod_base = OTHER; note = 2'-OMe modified nucleotide
  modified_base 12: mod_base = OTHER; note = 2'-OMe modified nucleotide
  modified_base 14: mod_base = OTHER; note = 2'-OMe modified nucleotide
  modified_base 16: mod_base = OTHER; note = 2'-OMe modified nucleotide
  modified_base 18: mod_base = OTHER; note = 2'-OMe modified nucleotide
  modified_base 1: mod_base = OTHER; note = 2-deoxy-2-fluoro ribonucleotide
  modified_base 3: mod_base = OTHER; note = 2-deoxy-2-fluoro ribonucleotide
  modified_base 5: mod_base = OTHER; note = 2-deoxy-2-fluoro ribonucleotide
  modified_base 7..9: mod_base = OTHER; note = 2-deoxy-2-fluoro ribonucleotide
  modified_base 11: mod_base = OTHER; note = 2-deoxy-2-fluoro ribonucleotide
  modified_base 13: mod_base = OTHER; note = 2-deoxy-2-fluoro ribonucleotide
  modified_base 15: mod_base = OTHER; note = 2-deoxy-2-fluoro ribonucleotide
  modified_base 17: mod_base = OTHER; note = 2-deoxy-2-fluoro ribonucleotide
  modified_base 19: mod_base = OTHER; note = 2-deoxy-2-fluoro ribonucleotide
  modified_base 20: mod_base = OTHER; note = Thymine
acagaatcaggtgtcctaat

SEQ ID NO: 964 - RNA, 20 nt, synthetic construct
  source 1..20: mol_type = other RNA
  modified_base 20: mod_base = OTHER; note = inverted deoxyribonucleotide
  modified_base 2: mod_base = OTHER; note = 2'-OMe modified nucleotide
  modified_base 4: mod_base = OTHER; note = 2'-OMe modified nucleotide
  modified_base 6: mod_base = OTHER; note = 2'-OMe modified nucleotide
  modified_base 8: mod_base = OTHER; note = 2'-OMe modified nucleotide
  modified_base 10: mod_base = OTHER; note = 2'-OMe modified nucleotide
  modified_base 12: mod_base = OTHER; note = 2'-OMe modified nucleotide
  modified_base 14: mod_base = OTHER; note = 2'-OMe modified nucleotide
  modified_base 16: mod_base = OTHER; note = 2'-OMe modified nucleotide
  modified_base 18: mod_base = OTHER; note = 2'-OMe modified nucleotide
  modified_base 1: mod_base = OTHER; note = 2-deoxy-2-fluoro ribonucleotide
  modified_base 3: mod_base = OTHER; note = 2-deoxy-2-fluoro ribonucleotide
  modified_base 5: mod_base = OTHER; note = 2-deoxy-2-fluoro ribonucleotide
  modified_base 7..9: mod_base = OTHER; note = 2-deoxy-2-fluoro ribonucleotide
  modified_base 11: mod_base = OTHER; note = 2-deoxy-2-fluoro ribonucleotide
  modified_base 13: mod_base = OTHER; note = 2-deoxy-2-fluoro ribonucleotide
  modified_base 15: mod_base = OTHER; note = 2-deoxy-2-fluoro ribonucleotide
  modified_base 17: mod_base = OTHER; note = 2-deoxy-2-fluoro ribonucleotide
  modified_base 19: mod_base = OTHER; note = 2-deoxy-2-fluoro ribonucleotide
  modified_base 20: mod_base = OTHER; note = Thymine
gaatcaggtgtcctagagat

SEQ ID NO: 965 - RNA, 20 nt, synthetic construct
  source 1..20: mol_type = other RNA
  modified_base 20: mod_base = OTHER; note = inverted deoxyribonucleotide
  modified_base 2: mod_base = OTHER; note = 2'-OMe modified nucleotide
  modified_base 4: mod_base = OTHER; note = 2'-OMe modified nucleotide
  modified_base 6: mod_base = OTHER; note = 2'-OMe modified nucleotide
  modified_base 8: mod_base = OTHER; note = 2'-OMe modified nucleotide
  modified_base 10: mod_base = OTHER; note = 2'-OMe modified nucleotide
  modified_base 12: mod_base = OTHER; note = 2'-OMe modified nucleotide
  modified_base 14: mod_base = OTHER; note = 2'-OMe modified nucleotide
  modified_base 16: mod_base = OTHER; note = 2'-OMe modified nucleotide
  modified_base 18: mod_base = OTHER; note = 2'-OMe modified nucleotide
  modified_base 1: mod_base = OTHER; note = 2-deoxy-2-fluoro ribonucleotide
  modified_base 3: mod_base = OTHER; note = 2-deoxy-2-fluoro ribonucleotide
  modified_base 5: mod_base = OTHER; note = 2-deoxy-2-fluoro ribonucleotide
  modified_base 7..9: mod_base = OTHER; note = 2-deoxy-2-fluoro ribonucleotide
  modified_base 11: mod_base = OTHER; note = 2-deoxy-2-fluoro ribonucleotide
  modified_base 13: mod_base = OTHER; note = 2-deoxy-2-fluoro ribonucleotide
  modified_base 15: mod_base = OTHER; note = 2-deoxy-2-fluoro ribonucleotide
  modified_base 17: mod_base = OTHER; note = 2-deoxy-2-fluoro ribonucleotide
  modified_base 19: mod_base = OTHER; note = 2-deoxy-2-fluoro ribonucleotide
  modified_base 20: mod_base = OTHER; note = Thymine
aatcaggtgtcctagagaat

SEQ ID NO: 966 - RNA, 20 nt, synthetic construct
  source 1..20: mol_type = other RNA
  modified_base 20: mod_base = OTHER; note = inverted deoxyribonucleotide
  modified_base 2: mod_base = OTHER; note = 2'-OMe modified nucleotide
  modified_base 4: mod_base = OTHER; note = 2'-OMe modified nucleotide
  modified_base 6: mod_base = OTHER; note = 2'-OMe modified nucleotide
  modified_base 8: mod_base = OTHER; note = 2'-OMe modified nucleotide
  modified_base 10: mod_base = OTHER; note = 2'-OMe modified nucleotide
  modified_base 12: mod_base = OTHER; note = 2'-OMe modified nucleotide
  modified_base 14: mod_base = OTHER; note = 2'-OMe modified nucleotide
  modified_base 16: mod_base = OTHER; note = 2'-OMe modified nucleotide
  modified_base 18: mod_base = OTHER; note = 2'-OMe modified nucleotide
  modified_base 1: mod_base = OTHER; note = 2-deoxy-2-fluoro ribonucleotide
  modified_base 3: mod_base = OTHER; note = 2-deoxy-2-fluoro ribonucleotide
  modified_base 5: mod_base = OTHER; note = 2-deoxy-2-fluoro ribonucleotide
  modified_base 7..9: mod_base = OTHER; note = 2-deoxy-2-fluoro ribonucleotide
  modified_base 11: mod_base = OTHER; note = 2-deoxy-2-fluoro ribonucleotide
  modified_base 13: mod_base = OTHER; note = 2-deoxy-2-fluoro ribonucleotide
  modified_base 15: mod_base = OTHER; note = 2-deoxy-2-fluoro ribonucleotide
  modified_base 17: mod_base = OTHER; note = 2-deoxy-2-fluoro ribonucleotide
  modified_base 19: mod_base = OTHER; note = 2-deoxy-2-fluoro ribonucleotide
  modified_base 20: mod_base = OTHER; note = Thymine
atcaggtgtcctagagacat

SEQ ID NO: 967 - RNA, 26 nt, synthetic construct
  source 1..26: mol_type = other RNA
  modified_base 1: mod_base = OTHER; note = 2'-OMe modified nucleotide
  modified_base 3: mod_base = OTHER; note = 2'-OMe modified nucleotide
  modified_base 5: mod_base = OTHER; note = 2'-OMe modified nucleotide
  modified_base 7: mod_base = OTHER; note = 2'-OMe modified nucleotide
  modified_base 9: mod_base = OTHER; note = 2'-OMe modified nucleotide
  modified_base 11: mod_base = OTHER; note = 2'-OMe modified nucleotide
  modified_base 13: mod_base = OTHER; note = 2'-OMe modified nucleotide
  modified_base 15: mod_base = OTHER; note = 2'-OMe modified nucleotide
  modified_base 17: mod_base = OTHER; note = 2'-OMe modified nucleotide
  modified_base 19: mod_base = OTHER; note = 2'-OMe modified nucleotide
  modified_base 21: mod_base = OTHER; note = 2'-OMe modified nucleotide
  modified_base 23: mod_base = OTHER; note = 2'-OMe modified nucleotide
  modified_base 25: mod_base = OTHER; note = 2'-OMe modified nucleotide
  modified_base 6: mod_base = OTHER; note = 2-deoxy-2-fluoro ribonucleotide
  modified_base 8: mod_base = OTHER; note = 2-deoxy-2-fluoro ribonucleotide
  modified_base 10: mod_base = OTHER; note = 2-deoxy-2-fluoro ribonucleotide
  modified_base 12: mod_base = OTHER; note = 2-deoxy-2-fluoro ribonucleotide
  modified_base 14: mod_base = OTHER; note = 2-deoxy-2-fluoro ribonucleotide
  modified_base 16: mod_base = OTHER; note = 2-deoxy-2-fluoro ribonucleotide
  modified_base 18: mod_base = OTHER; note = 2-deoxy-2-fluoro ribonucleotide
  modified_base 20: mod_base = OTHER; note = 2-deoxy-2-fluoro ribonucleotide
  modified_base 22: mod_base = OTHER; note = 2-deoxy-2-fluoro ribonucleotide
  modified_base 24: mod_base = OTHER; note = 2-deoxy-2-fluoro ribonucleotide
  modified_base 26: mod_base = OTHER; note = 2-deoxy-2-fluoro ribonucleotide
  modified_base 5..6: mod_base = OTHER; note = phosphorothioate internucleotide linkage
  modified_base 6..7: mod_base = OTHER; note = phosphorothioate internucleotide linkage
tatatagttatcgaggctcattctca

SEQ ID NO: 968 - RNA, 26 nt, synthetic construct
  source 1..26: mol_type = other RNA
  modified_base 1: mod_base = OTHER; note = 2'-OMe modified nucleotide
  modified_base 3: mod_base = OTHER; note = 2'-OMe modified nucleotide
  modified_base 5: mod_base = OTHER; note = 2'-OMe modified nucleotide
  modified_base 7: mod_base = OTHER; note = 2'-OMe modified nucleotide
  modified_base 9: mod_base = OTHER; note = 2'-OMe modified nucleotide
  modified_base 11: mod_base = OTHER; note = 2'-OMe modified nucleotide
  modified_base 13..14: mod_base = OTHER; note = 2'-OMe modified nucleotide
  modified_base 17: mod_base = OTHER; note = 2'-OMe modified nucleotide
  modified_base 19: mod_base = OTHER; note = 2'-OMe modified nucleotide
  modified_base 21: mod_base = OTHER; note = 2'-OMe modified nucleotide
  modified_base 23: mod_base = OTHER; note = 2'-OMe modified nucleotide
  modified_base 25: mod_base = OTHER; note = 2'-OMe modified nucleotide
  modified_base 6: mod_base = OTHER; note = 2-deoxy-2-fluoro ribonucleotide
  modified_base 8: mod_base = OTHER; note = 2-deoxy-2-fluoro ribonucleotide
  modified_base 10: mod_base = OTHER; note = 2-deoxy-2-fluoro ribonucleotide
  modified_base 12: mod_base = OTHER; note = 2-deoxy-2-fluoro ribonucleotide
  modified_base 15..16: mod_base = OTHER; note = 2-deoxy-2-fluoro ribonucleotide
  modified_base 18: mod_base = OTHER; note = 2-deoxy-2-fluoro ribonucleotide
  modified_base 20: mod_base = OTHER; note = 2-deoxy-2-fluoro ribonucleotide
  modified_base 22: mod_base = OTHER; note = 2-deoxy-2-fluoro ribonucleotide
  modified_base 24: mod_base = OTHER; note = 2-deoxy-2-fluoro ribonucleotide
  modified_base 26: mod_base = OTHER; note = 2-deoxy-2-fluoro ribonucleotide
  modified_base 5..6: mod_base = OTHER; note = phosphorothioate internucleotide linkage
  modified_base 6..7: mod_base = OTHER; note = phosphorothioate internucleotide linkage
tatatagttatcgaggctcattctca

SEQ ID NO: 969 - RNA, 26 nt, synthetic construct
  source 1..26: mol_type = other RNA
  modified_base 1: mod_base = OTHER; note = 2'-OMe modified nucleotide
  modified_base 3: mod_base = OTHER; note = 2'-OMe modified nucleotide
  modified_base 5: mod_base = OTHER; note = 2'-OMe modified nucleotide
  modified_base 7: mod_base = OTHER; note = 2'-OMe modified nucleotide
  modified_base 9: mod_base = OTHER; note = 2'-OMe modified nucleotide
  modified_base 11: mod_base = OTHER; note = 2'-OMe modified nucleotide
  modified_base 14: mod_base = OTHER; note = 2'-OMe modified nucleotide
  modified_base 17: mod_base = OTHER; note = 2'-OMe modified nucleotide
  modified_base 19: mod_base = OTHER; note = 2'-OMe modified nucleotide
  modified_base 21: mod_base = OTHER; note = 2'-OMe modified nucleotide
  modified_base 23: mod_base = OTHER; note = 2'-OMe modified nucleotide
  modified_base 25: mod_base = OTHER; note = 2'-OMe modified nucleotide
  modified_base 6: mod_base = OTHER; note = 2-deoxy-2-fluoro ribonucleotide
  modified_base 8: mod_base = OTHER; note = 2-deoxy-2-fluoro ribonucleotide
  modified_base 10: mod_base = OTHER; note = 2-deoxy-2-fluoro ribonucleotide
  modified_base 12..13: mod_base = OTHER; note = 2-deoxy-2-fluoro ribonucleotide
  modified_base 15..16: mod_base = OTHER; note = 2-deoxy-2-fluoro ribonucleotide
  modified_base 18: mod_base = OTHER; note = 2-deoxy-2-fluoro ribonucleotide
  modified_base 20: mod_base = OTHER; note = 2-deoxy-2-fluoro ribonucleotide
  modified_base 22: mod_base = OTHER; note = 2-deoxy-2-fluoro ribonucleotide
  modified_base 24: mod_base = OTHER; note = 2-deoxy-2-fluoro ribonucleotide
  modified_base 26: mod_base = OTHER; note = 2-deoxy-2-fluoro ribonucleotide
  modified_base 5..6: mod_base = OTHER; note = phosphorothioate internucleotide linkage
  modified_base 6..7: mod_base = OTHER; note = phosphorothioate internucleotide linkage
tatatagttatcgaggctcattctca

SEQ ID NO: 970 - RNA, 26 nt, synthetic construct
  source 1..26: mol_type = other RNA
  modified_base 1: mod_base = OTHER; note = 2'-OMe modified nucleotide
  modified_base 3: mod_base = OTHER; note = 2'-OMe modified nucleotide
  modified_base 5..6: mod_base = OTHER; note = 2'-OMe modified nucleotide
  modified_base 8: mod_base = OTHER; note = 2'-OMe modified nucleotide
  modified_base 10: mod_base = OTHER; note = 2'-OMe modified nucleotide
  modified_base 12: mod_base = OTHER; note = 2'-OMe modified nucleotide
  modified_base 14: mod_base = OTHER; note = 2'-OMe modified nucleotide
  modified_base 17: mod_base = OTHER; note = 2'-OMe modified nucleotide
  modified_base 19: mod_base = OTHER; note = 2'-OMe modified nucleotide
  modified_base 21: mod_base = OTHER; note = 2'-OMe modified nucleotide
  modified_base 23: mod_base = OTHER; note = 2'-OMe modified nucleotide
  modified_base 25: mod_base = OTHER; note = 2'-OMe modified nucleotide
  modified_base 7: mod_base = OTHER; note = 2-deoxy-2-fluoro ribonucleotide
  modified_base 9: mod_base = OTHER; note = 2-deoxy-2-fluoro ribonucleotide
  modified_base 11: mod_base = OTHER; note = 2-deoxy-2-fluoro ribonucleotide
  modified_base 13: mod_base = OTHER; note = 2-deoxy-2-fluoro ribonucleotide
  modified_base 15..16: mod_base = OTHER; note = 2-deoxy-2-fluoro ribonucleotide
  modified_base 18: mod_base = OTHER; note = 2-deoxy-2-fluoro ribonucleotide
  modified_base 20: mod_base = OTHER; note = 2-deoxy-2-fluoro ribonucleotide
  modified_base 22: mod_base = OTHER; note = 2-deoxy-2-fluoro ribonucleotide
  modified_base 24: mod_base = OTHER; note = 2-deoxy-2-fluoro ribonucleotide
  modified_base 26: mod_base = OTHER; note = 2-deoxy-2-fluoro ribonucleotide
  modified_base 5..6: mod_base = OTHER; note = phosphorothioate internucleotide linkage
  modified_base 6..7: mod_base = OTHER; note = phosphorothioate internucleotide linkage
tatatagttatcgaggctcattctca

SEQ ID NO: 971 - RNA, 26 nt, synthetic construct
  source 1..26: mol_type = other RNA
  modified_base 1: mod_base = OTHER; note = 2'-OMe modified nucleotide
  modified_base 3: mod_base = OTHER; note = 2'-OMe modified nucleotide
  modified_base 5: mod_base = OTHER; note = 2'-OMe modified nucleotide
  modified_base 7: mod_base = OTHER; note = 2'-OMe modified nucleotide
  modified_base 9: mod_base = OTHER; note = 2'-OMe modified nucleotide
  modified_base 11: mod_base = OTHER; note = 2'-OMe modified nucleotide
  modified_base 13: mod_base = OTHER; note = 2'-OMe modified nucleotide
  modified_base 15: mod_base = OTHER; note = 2'-OMe modified nucleotide
  modified_base 17: mod_base = OTHER; note = 2'-OMe modified nucleotide
  modified_base 19: mod_base = OTHER; note = 2'-OMe modified nucleotide
  modified_base 21: mod_base = OTHER; note = 2'-OMe modified nucleotide
  modified_base 23: mod_base = OTHER; note = 2'-OMe modified nucleotide
  modified_base 25: mod_base = OTHER; note = 2'-OMe modified nucleotide
  modified_base 6: mod_base = OTHER; note = 2-deoxy-2-fluoro ribonucleotide
  modified_base 8: mod_base = OTHER; note = 2-deoxy-2-fluoro ribonucleotide
  modified_base 10: mod_base = OTHER; note = 2-deoxy-2-fluoro ribonucleotide
  modified_base 12: mod_base = OTHER; note = 2-deoxy-2-fluoro ribonucleotide
  modified_base 14: mod_base = OTHER; note = 2-deoxy-2-fluoro ribonucleotide
  modified_base 16: mod_base = OTHER; note = 2-deoxy-2-fluoro ribonucleotide
  modified_base 18: mod_base = OTHER; note = 2-deoxy-2-fluoro ribonucleotide
  modified_base 20: mod_base = OTHER; note = 2-deoxy-2-fluoro ribonucleotide
  modified_base 22: mod_base = OTHER; note = 2-deoxy-2-fluoro ribonucleotide
  modified_base 24: mod_base = OTHER; note = 2-deoxy-2-fluoro ribonucleotide
  modified_base 26: mod_base = OTHER; note = 2-deoxy-2-fluoro ribonucleotide
  modified_base 5..6: mod_base = OTHER; note = phosphorothioate internucleotide linkage
  modified_base 6..7: mod_base = OTHER; note = phosphorothioate internucleotide linkage
tatatcagaaacagaatcaggtgtca

SEQ ID NO: 972 - RNA, 26 nt, synthetic construct
  source 1..26: mol_type = other RNA
  modified_base 1: mod_base = OTHER; note = 2'-OMe modified nucleotide
  modified_base 3: mod_base = OTHER; note = 2'-OMe modified nucleotide
  modified_base 5: mod_base = OTHER; note = 2'-OMe modified nucleotide
  modified_base 7: mod_base = OTHER; note = 2'-OMe modified nucleotide
  modified_base 9: mod_base = OTHER; note = 2'-OMe modified nucleotide
  modified_base 11: mod_base = OTHER; note = 2'-OMe modified nucleotide
  modified_base 13..14: mod_base = OTHER; note = 2'-OMe modified nucleotide
  modified_base 17: mod_base = OTHER; note = 2'-OMe modified nucleotide
  modified_base 19: mod_base = OTHER; note = 2'-OMe modified nucleotide
  modified_base 21: mod_base = OTHER; note = 2'-OMe modified nucleotide
  modified_base 23: mod_base = OTHER; note = 2'-OMe modified nucleotide
  modified_base 25: mod_base = OTHER; note = 2'-OMe modified nucleotide
  modified_base 6: mod_base = OTHER; note = 2-deoxy-2-fluoro ribonucleotide
  modified_base 8: mod_base = OTHER; note = 2-deoxy-2-fluoro ribonucleotide
  modified_base 10: mod_base = OTHER; note = 2-deoxy-2-fluoro ribonucleotide
  modified_base 12: mod_base = OTHER; note = 2-deoxy-2-fluoro ribonucleotide
  modified_base 15..16: mod_base = OTHER; note = 2-deoxy-2-fluoro ribonucleotide
  modified_base 18: mod_base = OTHER; note = 2-deoxy-2-fluoro ribonucleotide
  modified_base 20: mod_base = OTHER; note = 2-deoxy-2-fluoro ribonucleotide
  modified_base 22: mod_base = OTHER; note = 2-deoxy-2-fluoro ribonucleotide
  modified_base 24: mod_base = OTHER; note = 2-deoxy-2-fluoro ribonucleotide
  modified_base 26: mod_base = OTHER; note = 2-deoxy-2-fluoro ribonucleotide
  modified_base 5..6: mod_base = OTHER; note = phosphorothioate internucleotide linkage
  modified_base 6..7: mod_base = OTHER; note = phosphorothioate internucleotide linkage
tatatcagaaacagaatcaggtgtca

SEQ ID NO: 973 - RNA, 26 nt, synthetic construct
  source 1..26: mol_type = other RNA
  modified_base 1: mod_base = OTHER; note = 2'-OMe modified nucleotide
  modified_base 3: mod_base = OTHER; note = 2'-OMe modified nucleotide
  modified_base 5: mod_base = OTHER; note = 2'-OMe modified nucleotide
  modified_base 7: mod_base = OTHER; note = 2'-OMe modified nucleotide
  modified_base 9: mod_base = OTHER; note = 2'-OMe modified nucleotide
  modified_base 11: mod_base = OTHER; note = 2'-OMe modified nucleotide
  modified_base 14: mod_base = OTHER; note = 2'-OMe modified nucleotide
  modified_base 17: mod_base = OTHER; note = 2'-OMe modified nucleotide
  modified_base 19: mod_base = OTHER; note = 2'-OMe modified nucleotide
  modified_base 21: mod_base = OTHER; note = 2'-OMe modified nucleotide
  modified_base 23: mod_base = OTHER; note = 2'-OMe modified nucleotide
  modified_base 25: mod_base = OTHER; note = 2'-OMe modified nucleotide
  modified_base 6: mod_base = OTHER; note = 2-deoxy-2-fluoro ribonucleotide
  modified_base 8: mod_base = OTHER; note = 2-deoxy-2-fluoro ribonucleotide
  modified_base 10: mod_base = OTHER; note = 2-deoxy-2-fluoro ribonucleotide
  modified_base 12..13: mod_base = OTHER; note = 2-deoxy-2-fluoro ribonucleotide
  modified_base 15..16: mod_base = OTHER; note = 2-deoxy-2-fluoro ribonucleotide
  modified_base 18: mod_base = OTHER; note = 2-deoxy-2-fluoro ribonucleotide
  modified_base 20: mod_base = OTHER; note = 2-deoxy-2-fluoro ribonucleotide
  modified_base 22: mod_base = OTHER; note = 2-deoxy-2-fluoro ribonucleotide
  modified_base 24: mod_base = OTHER; note = 2-deoxy-2-fluoro ribonucleotide
  modified_base 26: mod_base = OTHER; note = 2-deoxy-2-fluoro ribonucleotide
  modified_base 5..6: mod_base = OTHER; note = phosphorothioate internucleotide linkage
  modified_base 6..7: mod_base = OTHER; note = phosphorothioate internucleotide linkage
tatatcagaaacagaatcaggtgtca

SEQ ID NO: 974 - RNA, 26 nt, synthetic construct
  source 1..26: mol_type = other RNA
  modified_base 1: mod_base = OTHER; note = 2'-OMe modified nucleotide
  modified_base 3: mod_base = OTHER; note = 2'-OMe modified nucleotide
  modified_base 5..6: mod_base = OTHER; note = 2'-OMe modified nucleotide
  modified_base 8: mod_base = OTHER; note = 2'-OMe modified nucleotide
  modified_base 10: mod_base = OTHER; note = 2'-OMe modified nucleotide
  modified_base 12: mod_base = OTHER; note = 2'-OMe modified nucleotide
  modified_base 14: mod_base = OTHER; note = 2'-OMe modified nucleotide
  modified_base 17: mod_base = OTHER; note = 2'-OMe modified nucleotide
  modified_base 19: mod_base = OTHER; note = 2'-OMe modified nucleotide
  modified_base 21: mod_base = OTHER; note = 2'-OMe modified nucleotide
  modified_base 23: mod_base = OTHER; note = 2'-OMe modified nucleotide
  modified_base 25: mod_base = OTHER; note = 2'-OMe modified nucleotide
  modified_base 7: mod_base = OTHER; note = 2-deoxy-2-fluoro ribonucleotide
  modified_base 9: mod_base = OTHER; note = 2-deoxy-2-fluoro ribonucleotide
  modified_base 11: mod_base = OTHER; note = 2-deoxy-2-fluoro ribonucleotide
  modified_base 13: mod_base = OTHER; note = 2-deoxy-2-fluoro ribonucleotide
  modified_base 15..16: mod_base = OTHER; note = 2-deoxy-2-fluoro ribonucleotide
  modified_base 18: mod_base = OTHER; note = 2-deoxy-2-fluoro ribonucleotide
  modified_base 20: mod_base = OTHER; note = 2-deoxy-2-fluoro ribonucleotide
  modified_base 22: mod_base = OTHER; note = 2-deoxy-2-fluoro ribonucleotide
  modified_base 24: mod_base = OTHER; note = 2-deoxy-2-fluoro ribonucleotide
  modified_base 26: mod_base = OTHER; note = 2-deoxy-2-fluoro ribonucleotide
  modified_base 5..6: mod_base = OTHER; note = phosphorothioate internucleotide linkage
  modified_base 6..7: mod_base = OTHER; note = phosphorothioate internucleotide linkage
tatatcagaaacagaatcaggtgtca

SEQ ID NO: 975 - RNA, 26 nt, synthetic construct
  source 1..26: mol_type = other RNA
  modified_base 1: mod_base = OTHER; note = 2'-OMe modified nucleotide
  modified_base 3: mod_base = OTHER; note = 2'-OMe modified nucleotide
  modified_base 5: mod_base = OTHER; note = 2'-OMe modified nucleotide
  modified_base 7: mod_base = OTHER; note = 2'-OMe modified nucleotide
  modified_base 9: mod_base = OTHER; note = 2'-OMe modified nucleotide
  modified_base 11: mod_base = OTHER; note = 2'-OMe modified nucleotide
  modified_base 13: mod_base = OTHER; note = 2'-OMe modified nucleotide
  modified_base 17: mod_base = OTHER; note = 2'-OMe modified nucleotide
  modified_base 19: mod_base = OTHER; note = 2'-OMe modified nucleotide
  modified_base 21: mod_base = OTHER; note = 2'-OMe modified nucleotide
  modified_base 23: mod_base = OTHER; note = 2'-OMe modified nucleotide
  modified_base 25: mod_base = OTHER; note = 2'-OMe modified nucleotide
  modified_base 6: mod_base = OTHER; note = 2-deoxy-2-fluoro ribonucleotide
  modified_base 8: mod_base = OTHER; note = 2-deoxy-2-fluoro ribonucleotide
  modified_base 10: mod_base = OTHER; note = 2-deoxy-2-fluoro ribonucleotide
  modified_base 12: mod_base = OTHER; note = 2-deoxy-2-fluoro ribonucleotide
  modified_base 14..16: mod_base = OTHER; note = 2-deoxy-2-fluoro ribonucleotide
  modified_base 18: mod_base = OTHER; note = 2-deoxy-2-fluoro ribonucleotide
  modified_base 20: mod_base = OTHER; note = 2-deoxy-2-fluoro ribonucleotide
  modified_base 22: mod_base = OTHER; note = 2-deoxy-2-fluoro ribonucleotide
  modified_base 24: mod_base = OTHER; note = 2-deoxy-2-fluoro ribonucleotide
  modified_base 26: mod_base = OTHER; note = 2-deoxy-2-fluoro ribonucleotide
  modified_base 5..6: mod_base = OTHER; note = phosphorothioate internucleotide linkage
  modified_base 6..7: mod_base = OTHER; note = phosphorothioate internucleotide linkage
tatatcagccccttattgttatacga

SEQ ID NO: 976 - RNA, 26 nt, synthetic construct
  source 1..26: mol_type = other RNA
  modified_base 1: mod_base = OTHER; note = 2'-OMe modified nucleotide
  modified_base 3: mod_base = OTHER; note = 2'-OMe modified nucleotide
  modified_base 5: mod_base = OTHER; note = 2'-OMe modified nucleotide
  modified_base 7: mod_base = OTHER; note = 2'-OMe modified nucleotide
  modified_base 9: mod_base = OTHER; note = 2'-OMe modified nucleotide
  modified_base 11: mod_base = OTHER; note = 2'-OMe modified nucleotide
  modified_base 13: mod_base = OTHER; note = 2'-OMe modified nucleotide
  modified_base 17: mod_base = OTHER; note = 2'-OMe modified nucleotide
  modified_base 19: mod_base = OTHER; note = 2'-OMe modified nucleotide
  modified_base 21: mod_base = OTHER; note = 2'-OMe modified nucleotide
  modified_base 23: mod_base = OTHER; note = 2'-OMe modified nucleotide
  modified_base 25: mod_base = OTHER; note = 2'-OMe modified nucleotide
  modified_base 6: mod_base = OTHER; note = 2-deoxy-2-fluoro ribonucleotide
  modified_base 8: mod_base = OTHER; note = 2-deoxy-2-fluoro ribonucleotide
  modified_base 10: mod_base = OTHER; note = 2-deoxy-2-fluoro ribonucleotide
  modified_base 12: mod_base = OTHER; note = 2-deoxy-2-fluoro ribonucleotide
  modified_base 14..16: mod_base = OTHER; note = 2-deoxy-2-fluoro ribonucleotide
  modified_base 18: mod_base = OTHER; note = 2-deoxy-2-fluoro ribonucleotide
  modified_base 20: mod_base = OTHER; note = 2-deoxy-2-fluoro ribonucleotide
  modified_base 22: mod_base = OTHER; note = 2-deoxy-2-fluoro ribonucleotide
  modified_base 24: mod_base = OTHER; note = 2-deoxy-2-fluoro ribonucleotide
  modified_base 26: mod_base = OTHER; note = 2-deoxy-2-fluoro ribonucleotide
  modified_base 5..6: mod_base = OTHER; note = phosphorothioate internucleotide linkage
  modified_base 6..7: mod_base = OTHER; note = phosphorothioate internucleotide linkage
tatatctgacacaatgctcagacgca

SEQ ID NO: 977 - RNA, 26 nt, synthetic construct
  source 1..26: mol_type = other RNA
  modified_base 1: mod_base = OTHER; note = 2'-OMe modified nucleotide
  modified_base 3: mod_base = OTHER; note = 2'-OMe modified nucleotide
  modified_base 5: mod_base = OTHER; note = 2'-OMe modified nucleotide
  modified_base 7: mod_base = OTHER; note = 2'-OMe modified nucleotide
  modified_base 9: mod_base = OTHER; note = 2'-OMe modified nucleotide
  modified_base 11: mod_base = OTHER; note = 2'-OMe modified nucleotide
  modified_base 13: mod_base = OTHER; note = 2'-OMe modified nucleotide
  modified_base 17: mod_base = OTHER; note = 2'-OMe modified nucleotide
  modified_base 19: mod_base = OTHER; note = 2'-OMe modified nucleotide
  modified_base 21: mod_base = OTHER; note = 2'-OMe modified nucleotide
  modified_base 23: mod_base = OTHER; note = 2'-OMe modified nucleotide
  modified_base 25: mod_base = OTHER; note = 2'-OMe modified nucleotide
  modified_base 6: mod_base = OTHER; note = 2-deoxy-2-fluoro ribonucleotide
  modified_base 8: mod_base = OTHER; note = 2-deoxy-2-fluoro ribonucleotide
  modified_base 10: mod_base = OTHER; note = 2-deoxy-2-fluoro ribonucleotide
  modified_base 12: mod_base = OTHER; note = 2-deoxy-2-fluoro ribonucleotide
  modified_base 14..16: mod_base = OTHER; note = 2-deoxy-2-fluoro ribonucleotide
  modified_base 18: mod_base = OTHER; note = 2-deoxy-2-fluoro ribonucleotide
  modified_base 20: mod_base = OTHER; note = 2-deoxy-2-fluoro ribonucleotide
  modified_base 22: mod_base = OTHER; note = 2-deoxy-2-fluoro ribonucleotide
  modified_base 24: mod_base = OTHER; note = 2-deoxy-2-fluoro ribonucleotide
  modified_base 26: mod_base = OTHER; note = 2-deoxy-2-fluoro ribonucleotide
  modified_base 5..6: mod_base = OTHER; note = phosphorothioate internucleotide linkage
  modified_base 6..7: mod_base = OTHER; note = phosphorothioate internucleotide linkage
tatattgacacaatgctcagacgcaa

SEQ ID NO: 978 - RNA, 26 nt, synthetic construct
  source 1..26: mol_type = other RNA
  modified_base 1: mod_base = OTHER; note = 2'-OMe modified nucleotide
  modified_base 3: mod_base = OTHER; note = 2'-OMe modified nucleotide
  modified_base 5: mod_base = OTHER; note = 2'-OMe modified nucleotide
  modified_base 7: mod_base = OTHER; note = 2'-OMe modified nucleotide
  modified_base 9: mod_base = OTHER; note = 2'-OMe modified nucleotide
  modified_base 11: mod_base = OTHER; note = 2'-OMe modified nucleotide
  modified_base 13: mod_base = OTHER; note = 2'-OMe modified nucleotide
  modified_base 17: mod_base = OTHER; note = 2'-OMe modified nucleotide
  modified_base 19: mod_base = OTHER; note = 2'-OMe modified nucleotide
  modified_base 21: mod_base = OTHER; note = 2'-OMe modified nucleotide
  modified_base 23: mod_base = OTHER; note = 2'-OMe modified nucleotide
  modified_base 25: mod_base = OTHER; note = 2'-OMe modified nucleotide
  modified_base 6: mod_base = OTHER; note = 2-deoxy-2-fluoro ribonucleotide
  modified_base 8: mod_base = OTHER; note = 2-deoxy-2-fluoro ribonucleotide
  modified_base 10: mod_base = OTHER; note = 2-deoxy-2-fluoro ribonucleotide
  modified_base 12: mod_base = OTHER; note = 2-deoxy-2-fluoro ribonucleotide
  modified_base 14..16: mod_base = OTHER; note = 2-deoxy-2-fluoro ribonucleotide
  modified_base 18: mod_base = OTHER; note = 2-deoxy-2-fluoro ribonucleotide
  modified_base 20: mod_base = OTHER; note = 2-deoxy-2-fluoro ribonucleotide
  modified_base 22: mod_base = OTHER; note = 2-deoxy-2-fluoro ribonucleotide
  modified_base 24: mod_base = OTHER; note = 2-deoxy-2-fluoro ribonucleotide
  modified_base 26: mod_base = OTHER; note = 2-deoxy-2-fluoro ribonucleotide
  modified_base 5..6: mod_base = OTHER; note = phosphorothioate internucleotide linkage
  modified_base 6..7: mod_base = OTHER; note = phosphorothioate internucleotide linkage
tatatagttatcgaggctcattctca

SEQ ID NO: 979 - RNA, 26 nt, synthetic construct
  source 1..26: mol_type = other RNA
  modified_base 1: mod_base = OTHER; note = 2'-OMe modified nucleotide
  modified_base 3: mod_base = OTHER; note = 2'-OMe modified nucleotide
  modified_base 5: mod_base = OTHER; note = 2'-OMe modified nucleotide
  modified_base 7: mod_base = OTHER; note = 2'-OMe modified nucleotide
  modified_base 9: mod_base = OTHER; note = 2'-OMe modified nucleotide
  modified_base 11: mod_base = OTHER; note = 2'-OMe modified nucleotide
  modified_base 13: mod_base = OTHER; note = 2'-OMe modified nucleotide
  modified_base 17: mod_base = OTHER; note = 2'-OMe modified nucleotide
  modified_base 19: mod_base = OTHER; note = 2'-OMe modified nucleotide
  modified_base 21: mod_base = OTHER; note = 2'-OMe modified nucleotide
  modified_base 23: mod_base = OTHER; note = 2'-OMe modified nucleotide
  modified_base 25: mod_base = OTHER; note = 2'-OMe modified nucleotide
  modified_base 6: mod_base = OTHER; note = 2-deoxy-2-fluoro ribonucleotide
  modified_base 8: mod_base = OTHER; note = 2-deoxy-2-fluoro ribonucleotide
  modified_base 10: mod_base = OTHER; note = 2-deoxy-2-fluoro ribonucleotide
  modified_base 12: mod_base = OTHER; note = 2-deoxy-2-fluoro ribonucleotide
  modified_base 14..16: mod_base = OTHER; note = 2-deoxy-2-fluoro ribonucleotide
  modified_base 18: mod_base = OTHER; note = 2-deoxy-2-fluoro ribonucleotide
  modified_base 20: mod_base = OTHER; note = 2-deoxy-2-fluoro ribonucleotide
  modified_base 22: mod_base = OTHER; note = 2-deoxy-2-fluoro ribonucleotide
  modified_base 24: mod_base = OTHER; note = 2-deoxy-2-fluoro ribonucleotide
  modified_base 26: mod_base = OTHER; note = 2-deoxy-2-fluoro ribonucleotide
  modified_base 5..6: mod_base = OTHER; note = phosphorothioate internucleotide linkage
  modified_base 6..7: mod_base = OTHER; note = phosphorothioate internucleotide linkage
tatatcagaaacagaatcaggtgtca

SEQ ID NO: 980 - RNA, 26 nt, synthetic construct
  source 1..26: mol_type = other RNA
  modified_base 1: mod_base = OTHER; note = 2'-OMe modified nucleotide
  modified_base 3: mod_base = OTHER; note = 2'-OMe modified nucleotide
  modified_base 5: mod_base = OTHER; note = 2'-OMe modified nucleotide
  modified_base 7: mod_base = OTHER; note = 2'-OMe modified nucleotide
  modified_base 9: mod_base = OTHER; note = 2'-OMe modified nucleotide
  modified_base 11: mod_base = OTHER; note = 2'-OMe modified nucleotide
  modified_base 13: mod_base = OTHER; note = 2'-OMe modified nucleotide
  modified_base 17: mod_base = OTHER; note = 2'-OMe modified nucleotide
  modified_base 19: mod_base = OTHER; note = 2'-OMe modified nucleotide
  modified_base 21: mod_base = OTHER; note = 2'-OMe modified nucleotide
  modified_base 23: mod_base = OTHER; note = 2'-OMe modified nucleotide
  modified_base 25: mod_base = OTHER; note = 2'-OMe modified nucleotide
  modified_base 6: mod_base = OTHER; note = 2-deoxy-2-fluoro ribonucleotide
  modified_base 8: mod_base = OTHER; note = 2-deoxy-2-fluoro ribonucleotide
  modified_base 10: mod_base = OTHER; note = 2-deoxy-2-fluoro ribonucleotide
  modified_base 12: mod_base = OTHER; note = 2-deoxy-2-fluoro ribonucleotide
  modified_base 14..16: mod_base = OTHER; note = 2-deoxy-2-fluoro ribonucleotide
  modified_base 18: mod_base = OTHER; note = 2-deoxy-2-fluoro ribonucleotide
  modified_base 20: mod_base = OTHER; note = 2-deoxy-2-fluoro ribonucleotide
  modified_base 22: mod_base = OTHER; note = 2-deoxy-2-fluoro ribonucleotide
  modified_base 24: mod_base = OTHER; note = 2-deoxy-2-fluoro ribonucleotide
  modified_base 26: mod_base = OTHER; note = 2-deoxy-2-fluoro ribonucleotide
  modified_base 5..6: mod_base = OTHER; note = phosphorothioate internucleotide linkage
  modified_base 6..7: mod_base = OTHER; note = phosphorothioate internucleotide linkage
tatatagatgctgagattcgccctta

SEQ ID NO: 981 - RNA, 18 nt, synthetic construct
  source 1..18: mol_type = other RNA
  modified_base 18: mod_base = OTHER; note = inverted deoxyribonucleotide
  modified_base 1: mod_base = OTHER; note = 2'-OMe modified nucleotide
  modified_base 3: mod_base = OTHER; note = 2'-OMe modified nucleotide
  modified_base 5: mod_base = OTHER; note = 2'-OMe modified nucleotide
  modified_base 7: mod_base = OTHER; note = 2'-OMe modified nucleotide
  modified_base 9: mod_base = OTHER; note = 2'-OMe modified nucleotide
  modified_base 11: mod_base = OTHER; note = 2'-OMe modified nucleotide
  modified_base 13: mod_base = OTHER; note = 2'-OMe modified nucleotide
  modified_base 15: mod_base = OTHER; note = 2'-OMe modified nucleotide
  modified_base 17: mod_base = OTHER; note = 2'-OMe modified nucleotide
  modified_base 2: mod_base = OTHER; note = 2-deoxy-2-fluoro ribonucleotide
  modified_base 4: mod_base = OTHER; note = 2-deoxy-2-fluoro ribonucleotide
  modified_base 6: mod_base = OTHER; note = 2-deoxy-2-fluoro ribonucleotide
  modified_base 8: mod_base = OTHER; note = 2-deoxy-2-fluoro ribonucleotide
  modified_base 10: mod_base = OTHER; note = 2-deoxy-2-fluoro ribonucleotide
  modified_base 12: mod_base = OTHER; note = 2-deoxy-2-fluoro ribonucleotide
  modified_base 14: mod_base = OTHER; note = 2-deoxy-2-fluoro ribonucleotide
  modified_base 16: mod_base = OTHER; note = 2-deoxy-2-fluoro ribonucleotide
  modified_base 1..2: mod_base = OTHER; note = phosphorothioate internucleotide linkage
  modified_base 2..3: mod_base = OTHER; note = phosphorothioate internucleotide linkage
gcagccccttattgttaa

SEQ ID NO: 982 - RNA, 18 nt, synthetic construct
  source 1..18: mol_type = other RNA
  modified_base 18: mod_base = OTHER; note = inverted deoxyribonucleotide
  modified_base 1: mod_base = OTHER; note = 2'-OMe modified nucleotide
  modified_base 3: mod_base = OTHER; note = 2'-OMe modified nucleotide
  modified_base 5: mod_base = OTHER; note = 2'-OMe modified nucleotide
  modified_base 7: mod_base = OTHER; note = 2'-OMe modified nucleotide
  modified_base 9: mod_base = OTHER; note = 2'-OMe modified nucleotide
  modified_base 11: mod_base = OTHER; note = 2'-OMe modified nucleotide
  modified_base 13: mod_base = OTHER; note = 2'-OMe modified nucleotide
  modified_base 15: mod_base = OTHER; note = 2'-OMe modified nucleotide
  modified_base 17: mod_base = OTHER; note = 2'-OMe modified nucleotide
  modified_base 2: mod_base = OTHER; note = 2-deoxy-2-fluoro ribonucleotide
  modified_base 4: mod_base = OTHER; note = 2-deoxy-2-fluoro ribonucleotide
  modified_base 6: mod_base = OTHER; note = 2-deoxy-2-fluoro ribonucleotide
  modified_base 8: mod_base = OTHER; note = 2-deoxy-2-fluoro ribonucleotide
  modified_base 10: mod_base = OTHER; note = 2-deoxy-2-fluoro ribonucleotide
  modified_base 12: mod_base = OTHER; note = 2-deoxy-2-fluoro ribonucleotide
  modified_base 14: mod_base = OTHER; note = 2-deoxy-2-fluoro ribonucleotide
  modified_base 16: mod_base = OTHER; note = 2-deoxy-2-fluoro ribonucleotide
  modified_base 1..2: mod_base = OTHER; note = phosphorothioate internucleotide linkage
  modified_base 2..3: mod_base = OTHER; note = phosphorothioate internucleotide linkage
gccccttattgttataca

SEQ ID NO: 983 - RNA, 18 nt, synthetic construct
  source 1..18: mol_type = other RNA
  modified_base 18: mod_base = OTHER; note = inverted deoxyribonucleotide
  modified_base 1: mod_base = OTHER; note = 2'-OMe modified nucleotide
  modified_base 3: mod_base = OTHER; note = 2'-OMe modified nucleotide
  modified_base 5: mod_base = OTHER; note = 2'-OMe modified nucleotide
  modified_base 7: mod_base = OTHER; note = 2'-OMe modified nucleotide
  modified_base 9: mod_base = OTHER; note = 2'-OMe modified nucleotide
  modified_base 11: mod_base = OTHER; note = 2'-OMe modified nucleotide
  modified_base 13: mod_base = OTHER; note = 2'-OMe modified nucleotide
  modified_base 15: mod_base = OTHER; note = 2'-OMe modified nucleotide
  modified_base 17: mod_base = OTHER; note = 2'-OMe modified nucleotide
  modified_base 2: mod_base = OTHER; note = 2-deoxy-2-fluoro ribonucleotide
  modified_base 4: mod_base = OTHER; note = 2-deoxy-2-fluoro ribonucleotide
  modified_base 6: mod_base = OTHER; note = 2-deoxy-2-fluoro ribonucleotide
  modified_base 8: mod_base = OTHER; note = 2-deoxy-2-fluoro ribonucleotide
  modified_base 10: mod_base = OTHER; note = 2-deoxy-2-fluoro ribonucleotide
  modified_base 12: mod_base = OTHER; note = 2-deoxy-2-fluoro ribonucleotide
  modified_base 14: mod_base = OTHER; note = 2-deoxy-2-fluoro ribonucleotide
  modified_base 16: mod_base = OTHER; note = 2-deoxy-2-fluoro ribonucleotide
  modified_base 1..2: mod_base = OTHER; note = phosphorothioate internucleotide linkage
  modified_base 2..3: mod_base = OTHER; note = phosphorothioate internucleotide linkage
ccccttattgttatacga

SEQ ID NO: 984 - RNA, 18 nt, synthetic construct
  source 1..18: mol_type = other RNA
  modified_base 18: mod_base = OTHER; note = inverted deoxyribonucleotide
  modified_base 1: mod_base = OTHER; note = 2'-OMe modified nucleotide
  modified_base 3: mod_base = OTHER; note = 2'-OMe modified nucleotide
  modified_base 5: mod_base = OTHER; note = 2'-OMe modified nucleotide
  modified_base 7: mod_base = OTHER; note = 2'-OMe modified nucleotide
  modified_base 9: mod_base = OTHER; note = 2'-OMe modified nucleotide
  modified_base 11: mod_base = OTHER; note = 2'-OMe modified nucleotide
  modified_base 13: mod_base = OTHER; note = 2'-OMe modified nucleotide
  modified_base 15: mod_base = OTHER; note = 2'-OMe modified nucleotide
  modified_base 17: mod_base = OTHER; note = 2'-OMe modified nucleotide
  modified_base 2: mod_base = OTHER; note = 2-deoxy-2-fluoro ribonucleotide
  modified_base 4: mod_base = OTHER; note = 2-deoxy-2-fluoro ribonucleotide
  modified_base 6: mod_base = OTHER; note = 2-deoxy-2-fluoro ribonucleotide
  modified_base 8: mod_base = OTHER; note = 2-deoxy-2-fluoro ribonucleotide
  modified_base 10: mod_base = OTHER; note = 2-deoxy-2-fluoro ribonucleotide
  modified_base 12: mod_base = OTHER; note = 2-deoxy-2-fluoro ribonucleotide
  modified_base 14: mod_base = OTHER; note = 2-deoxy-2-fluoro ribonucleotide
  modified_base 16: mod_base = OTHER; note = 2-deoxy-2-fluoro ribonucleotide
  modified_base 1..2: mod_base = OTHER; note = phosphorothioate internucleotide linkage
  modified_base 2..3: mod_base = OTHER; note = phosphorothioate internucleotide linkage
acacaatgctcagacgca

SEQ ID NO: 985 - RNA, 18 nt, synthetic construct
  source 1..18: mol_type = other RNA
  modified_base 18: mod_base = OTHER; note = inverted deoxyribonucleotide
  modified_base 1: mod_base = OTHER; note = 2'-OMe modified nucleotide
  modified_base 3: mod_base = OTHER; note = 2'-OMe modified nucleotide
  modified_base 5: mod_base = OTHER; note = 2'-OMe modified nucleotide
  modified_base 7: mod_base = OTHER; note = 2'-OMe modified nucleotide
  modified_base 9: mod_base = OTHER; note = 2'-OMe modified nucleotide
  modified_base 11: mod_base = OTHER; note = 2'-OMe modified nucleotide
  modified_base 13: mod_base = OTHER; note = 2'-OMe modified nucleotide
  modified_base 15: mod_base = OTHER; note = 2'-OMe modified nucleotide
  modified_base 17: mod_base = OTHER; note = 2'-OMe modified nucleotide
  modified_base 2: mod_base = OTHER; note = 2-deoxy-2-fluoro ribonucleotide
  modified_base 4: mod_base = OTHER; note = 2-deoxy-2-fluoro ribonucleotide
  modified_base 6: mod_base = OTHER; note = 2-deoxy-2-fluoro ribonucleotide
  modified_base 8: mod_base = OTHER; note = 2-deoxy-2-fluoro ribonucleotide
  modified_base 10: mod_base = OTHER; note = 2-deoxy-2-fluoro ribonucleotide
  modified_base 12: mod_base = OTHER; note = 2-deoxy-2-fluoro ribonucleotide
  modified_base 14: mod_base = OTHER; note = 2-deoxy-2-fluoro ribonucleotide
  modified_base 16: mod_base = OTHER; note = 2-deoxy-2-fluoro ribonucleotide
  modified_base 1..2: mod_base = OTHER; note = phosphorothioate internucleotide linkage
  modified_base 2..3: mod_base = OTHER; note = phosphorothioate internucleotide linkage
cacaatgctcagacgcaa

SEQ ID NO: 986 - RNA, 18 nt, synthetic construct
  source 1..18: mol_type = other RNA
  modified_base 18: mod_base = OTHER; note = inverted deoxyribonucleotide
  modified_base 1: mod_base = OTHER; note = 2'-OMe modified nucleotide
  modified_base 3: mod_base = OTHER; note = 2'-OMe modified nucleotide
  modified_base 5: mod_base = OTHER; note = 2'-OMe modified nucleotide
  modified_base 7: mod_base = OTHER; note = 2'-OMe modified nucleotide
  modified_base 9: mod_base = OTHER; note = 2'-OMe modified nucleotide
  modified_base 11: mod_base = OTHER; note = 2'-OMe modified nucleotide
  modified_base 13: mod_base = OTHER; note = 2'-OMe modified nucleotide
  modified_base 15: mod_base = OTHER; note = 2'-OMe modified nucleotide
  modified_base 17: mod_base = OTHER; note = 2'-OMe modified nucleotide
  modified_base 2: mod_base = OTHER; note = 2-deoxy-2-fluoro ribonucleotide
  modified_base 4: mod_base = OTHER; note = 2-deoxy-2-fluoro ribonucleotide
  modified_base 6: mod_base = OTHER; note = 2-deoxy-2-fluoro ribonucleotide
  modified_base 8: mod_base = OTHER; note = 2-deoxy-2-fluoro ribonucleotide
  modified_base 10: mod_base = OTHER; note = 2-deoxy-2-fluoro ribonucleotide
  modified_base 12: mod_base = OTHER; note = 2-deoxy-2-fluoro ribonucleotide
  modified_base 14: mod_base = OTHER; note = 2-deoxy-2-fluoro ribonucleotide
  modified_base 16: mod_base = OTHER; note = 2-deoxy-2-fluoro ribonucleotide
  modified_base 1..2: mod_base = OTHER; note = phosphorothioate internucleotide linkage
  modified_base 2..3: mod_base = OTHER; note = phosphorothioate internucleotide linkage
ccgaaatccagatcctga

SEQ ID NO: 987 - RNA, 18 nt, synthetic construct
  source 1..18: mol_type = other RNA
  modified_base 18: mod_base = OTHER; note = inverted deoxyribonucleotide
  modified_base 1: mod_base = OTHER; note = 2'-OMe modified nucleotide
  modified_base 3: mod_base = OTHER; note = 2'-OMe modified nucleotide
  modified_base 5: mod_base = OTHER; note = 2'-OMe modified nucleotide
  modified_base 7: mod_base = OTHER; note = 2'-OMe modified nucleotide
  modified_base 9: mod_base = OTHER; note = 2'-OMe modified nucleotide
  modified_base 11: mod_base = OTHER; note = 2'-OMe modified nucleotide
  modified_base 13: mod_base = OTHER; note = 2'-OMe modified nucleotide
  modified_base 15: mod_base = OTHER; note = 2'-OMe modified nucleotide
  modified_base 17: mod_base = OTHER; note = 2'-OMe modified nucleotide
  modified_base 2: mod_base = OTHER; note = 2-deoxy-2-fluoro ribonucleotide
  modified_base 4: mod_base = OTHER; note = 2-deoxy-2-fluoro ribonucleotide
  modified_base 6: mod_base = OTHER; note = 2-deoxy-2-fluoro ribonucleotide
  modified_base 8: mod_base = OTHER; note = 2-deoxy-2-fluoro ribonucleotide
  modified_base 10: mod_base = OTHER; note = 2-deoxy-2-fluoro ribonucleotide
  modified_base 12: mod_base = OTHER; note = 2-deoxy-2-fluoro ribonucleotide
  modified_base 14: mod_base = OTHER; note = 2-deoxy-2-fluoro ribonucleotide
  modified_base 16: mod_base = OTHER; note = 2-deoxy-2-fluoro ribonucleotide
  modified_base 1..2: mod_base = OTHER; note = phosphorothioate internucleotide linkage
  modified_base 2..3: mod_base = OTHER; note = phosphorothioate internucleotide linkage
cacgatgctcagatgcaa

SEQ ID NO: 988 - RNA, 18 nt, synthetic construct
  source 1..18: mol_type = other RNA
  modified_base 18: mod_base = OTHER; note = inverted deoxyribonucleotide
  modified_base 1: mod_base = OTHER; note = 2'-OMe modified nucleotide
  modified_base 3: mod_base = OTHER; note = 2'-OMe modified nucleotide
  modified_base 5: mod_base = OTHER; note = 2'-OMe modified nucleotide
  modified_base 7: mod_base = OTHER; note = 2'-OMe modified nucleotide
  modified_base 9: mod_base = OTHER; note = 2'-OMe modified nucleotide
  modified_base 11: mod_base = OTHER; note = 2'-OMe modified nucleotide
  modified_base 13: mod_base = OTHER; note = 2'-OMe modified nucleotide
  modified_base 15: mod_base = OTHER; note = 2'-OMe modified nucleotide
  modified_base 17: mod_base = OTHER; note = 2'-OMe modified nucleotide
  modified_base 2: mod_base = OTHER; note = 2-deoxy-2-fluoro ribonucleotide
  modified_base 4: mod_base = OTHER; note = 2-deoxy-2-fluoro ribonucleotide
  modified_base 6: mod_base = OTHER; note = 2-deoxy-2-fluoro ribonucleotide
  modified_base 8: mod_base = OTHER; note = 2-deoxy-2-fluoro ribonucleotide
  modified_base 10: mod_base = OTHER; note = 2-deoxy-2-fluoro ribonucleotide
  modified_base 12: mod_base = OTHER; note = 2-deoxy-2-fluoro ribonucleotide
  modified_base 14: mod_base = OTHER; note = 2-deoxy-2-fluoro ribonucleotide
  modified_base 16: mod_base = OTHER; note = 2-deoxy-2-fluoro ribonucleotide
  modified_base 1..2: mod_base = OTHER; note = phosphorothioate internucleotide linkage
  modified_base 2..3: mod_base = OTHER; note = phosphorothioate internucleotide linkage
ccacaccagcatagtcga

SEQ ID NO: 989 - RNA, 18 nt, synthetic construct
  source 1..18: mol_type = other RNA
  modified_base 18: mod_base = OTHER; note = inverted deoxyribonucleotide
  modified_base 1: mod_base = OTHER; note = 2'-OMe modified nucleotide
  modified_base 3: mod_base = OTHER; note = 2'-OMe modified nucleotide
  modified_base 5: mod_base = OTHER; note = 2'-OMe modified nucleotide
  modified_base 7: mod_base = OTHER; note = 2'-OMe modified nucleotide
  modified_base 9: mod_base = OTHER; note = 2'-OMe modified nucleotide
  modified_base 11: mod_base = OTHER; note = 2'-OMe modified nucleotide
  modified_base 13: mod_base = OTHER; note = 2'-OMe modified nucleotide
  modified_base 15: mod_base = OTHER; note = 2'-OMe modified nucleotide
  modified_base 17: mod_base = OTHER; note = 2'-OMe modified nucleotide
  modified_base 2: mod_base = OTHER; note = 2-deoxy-2-fluoro ribonucleotide
  modified_base 4: mod_base = OTHER; note = 2-deoxy-2-fluoro ribonucleotide
  modified_base 6: mod_base = OTHER; note = 2-deoxy-2-fluoro ribonucleotide
  modified_base 8: mod_base = OTHER; note = 2-deoxy-2-fluoro ribonucleotide
  modified_base 10: mod_base = OTHER; note = 2-deoxy-2-fluoro ribonucleotide
  modified_base 12: mod_base = OTHER; note = 2-deoxy-2-fluoro ribonucleotide
  modified_base 14: mod_base = OTHER; note = 2-deoxy-2-fluoro ribonucleotide
  modified_base 16: mod_base = OTHER; note = 2-deoxy-2-fluoro ribonucleotide
  modified_base 1..2: mod_base = OTHER; note = phosphorothioate internucleotide linkage
  modified_base 2..3: mod_base = OTHER; note = phosphorothioate internucleotide linkage
tagtcggaccccagaaaa

SEQ ID NO: 990 - RNA, 18 nt, synthetic construct
  source 1..18: mol_type = other RNA
  modified_base 18: mod_base = OTHER; note = inverted deoxyribonucleotide
  modified_base 1: mod_base = OTHER; note = 2'-OMe modified nucleotide
  modified_base 3: mod_base = OTHER; note = 2'-OMe modified nucleotide
  modified_base 5: mod_base = OTHER; note = 2'-OMe modified nucleotide
  modified_base 7: mod_base = OTHER; note = 2'-OMe modified nucleotide
  modified_base 9: mod_base = OTHER; note = 2'-OMe modified nucleotide
  modified_base 11: mod_base = OTHER; note = 2'-OMe modified nucleotide
  modified_base 13: mod_base = OTHER; note = 2'-OMe modified nucleotide
  modified_base 15: mod_base = OTHER; note = 2'-OMe modified nucleotide
  modified_base 17: mod_base = OTHER; note = 2'-OMe modified nucleotide
  modified_base 2: mod_base = OTHER; note = 2-deoxy-2-fluoro ribonucleotide
  modified_base 4: mod_base = OTHER; note = 2-deoxy-2-fluoro ribonucleotide
  modified_base 6: mod_base = OTHER; note = 2-deoxy-2-fluoro ribonucleotide
  modified_base 8: mod_base = OTHER; note = 2-deoxy-2-fluoro ribonucleotide
  modified_base 10: mod_base = OTHER; note = 2-deoxy-2-fluoro ribonucleotide
  modified_base 12: mod_base = OTHER; note = 2-deoxy-2-fluoro ribonucleotide
  modified_base 14: mod_base = OTHER; note = 2-deoxy-2-fluoro ribonucleotide
  modified_base 16: mod_base = OTHER; note = 2-deoxy-2-fluoro ribonucleotide
  modified_base 1..2: mod_base = OTHER; note = phosphorothioate internucleotide linkage
  modified_base 2..3: mod_base = OTHER; note = phosphorothioate internucleotide linkage
cagatgctgagattcgca

SEQ ID NO: 991 - RNA, 18 nt, synthetic construct
  source 1..18: mol_type = other RNA
  modified_base 18: mod_base = OTHER; note = inverted deoxyribonucleotide
  modified_base 1: mod_base = OTHER; note = 2'-OMe modified nucleotide
  modified_base 3: mod_base = OTHER; note = 2'-OMe modified nucleotide
  modified_base 5: mod_base = OTHER; note = 2'-OMe modified nucleotide
  modified_base 7: mod_base = OTHER; note = 2'-OMe modified nucleotide
  modified_base 9: mod_base = OTHER; note = 2'-OMe modified nucleotide
  modified_base 11: mod_base = OTHER; note = 2'-OMe modified nucleotide
  modified_base 13: mod_base = OTHER; note = 2'-OMe modified nucleotide
  modified_base 15: mod_base = OTHER; note = 2'-OMe modified nucleotide
  modified_base 17: mod_base = OTHER; note = 2'-OMe modified nucleotide
  modified_base 2: mod_base = OTHER; note = 2-deoxy-2-fluoro ribonucleotide
  modified_base 4: mod_base = OTHER; note = 2-deoxy-2-fluoro ribonucleotide
  modified_base 6: mod_base = OTHER; note = 2-deoxy-2-fluoro ribonucleotide
  modified_base 8: mod_base = OTHER; note = 2-deoxy-2-fluoro ribonucleotide
  modified_base 10: mod_base = OTHER; note = 2-deoxy-2-fluoro ribonucleotide
  modified_base 12: mod_base = OTHER; note = 2-deoxy-2-fluoro ribonucleotide
  modified_base 14: mod_base = OTHER; note = 2-deoxy-2-fluoro ribonucleotide
  modified_base 16: mod_base = OTHER; note = 2-deoxy-2-fluoro ribonucleotide
  modified_base 1..2: mod_base = OTHER; note = phosphorothioate internucleotide linkage
  modified_base 2..3: mod_base = OTHER; note = phosphorothioate internucleotide linkage
aatcaagtgtccttgcaa

SEQ ID NO: 992 - RNA, 18 nt, synthetic construct
  source 1..18: mol_type = other RNA
  modified_base 18: mod_base = OTHER; note = inverted deoxyribonucleotide
  modified_base 1: mod_base = OTHER; note = 2'-OMe modified nucleotide
  modified_base 3: mod_base = OTHER; note = 2'-OMe modified nucleotide
  modified_base 5: mod_base = OTHER; note = 2'-OMe modified nucleotide
  modified_base 7: mod_base = OTHER; note = 2'-OMe modified nucleotide
  modified_base 9: mod_base = OTHER; note = 2'-OMe modified nucleotide
  modified_base 11: mod_base = OTHER; note = 2'-OMe modified nucleotide
  modified_base 13: mod_base = OTHER; note = 2'-OMe modified nucleotide
  modified_base 15: mod_base = OTHER; note = 2'-OMe modified nucleotide
  modified_base 17: mod_base = OTHER; note = 2'-OMe modified nucleotide
  modified_base 2: mod_base = OTHER; note = 2-deoxy-2-fluoro ribonucleotide
  modified_base 4: mod_base = OTHER; note = 2-deoxy-2-fluoro ribonucleotide
  modified_base 6: mod_base = OTHER; note = 2-deoxy-2-fluoro ribonucleotide
  modified_base 8: mod_base = OTHER; note = 2-deoxy-2-fluoro ribonucleotide
  modified_base 10: mod_base = OTHER; note = 2-deoxy-2-fluoro ribonucleotide
  modified_base 12: mod_base = OTHER; note = 2-deoxy-2-fluoro ribonucleotide
  modified_base 14: mod_base = OTHER; note = 2-deoxy-2-fluoro ribonucleotide
  modified_base 16: mod_base = OTHER; note = 2-deoxy-2-fluoro ribonucleotide
  modified_base 1..2: mod_base = OTHER; note = phosphorothioate internucleotide linkage
  modified_base 2..3: mod_base = OTHER; note = phosphorothioate internucleotide linkage
agttatcgaggctcatta

SEQ ID NO: 993 - RNA, 18 nt, synthetic construct
  source 1..18: mol_type = other RNA
  modified_base 18: mod_base = OTHER; note = inverted deoxyribonucleotide
  modified_base 1: mod_base = OTHER; note = 2'-OMe modified nucleotide
  modified_base 3: mod_base = OTHER; note = 2'-OMe modified nucleotide
  modified_base 5: mod_base = OTHER; note = 2'-OMe modified nucleotide
  modified_base 7: mod_base = OTHER; note = 2'-OMe modified nucleotide
  modified_base 9: mod_base = OTHER; note = 2'-OMe modified nucleotide
  modified_base 11: mod_base = OTHER; note = 2'-OMe modified nucleotide
  modified_base 13: mod_base = OTHER; note = 2'-OMe modified nucleotide
  modified_base 15: mod_base = OTHER; note = 2'-OMe modified nucleotide
  modified_base 17: mod_base = OTHER; note = 2'-OMe modified nucleotide
  modified_base 2: mod_base = OTHER; note = 2-deoxy-2-fluoro ribonucleotide
  modified_base 4: mod_base = OTHER; note = 2-deoxy-2-fluoro ribonucleotide
  modified_base 6: mod_base = OTHER; note = 2-deoxy-2-fluoro ribonucleotide
  modified_base 8: mod_base = OTHER; note = 2-deoxy-2-fluoro ribonucleotide
  modified_base 10: mod_base = OTHER; note = 2-deoxy-2-fluoro ribonucleotide
  modified_base 12: mod_base = OTHER; note = 2-deoxy-2-fluoro ribonucleotide
  modified_base 14: mod_base = OTHER; note = 2-deoxy-2-fluoro ribonucleotide
  modified_base 16: mod_base = OTHER; note = 2-deoxy-2-fluoro ribonucleotide
  modified_base 1..2: mod_base = OTHER; note = phosphorothioate internucleotide linkage
  modified_base 2..3: mod_base = OTHER; note = phosphorothioate internucleotide linkage
gttatcgaggctcattca

SEQ ID NO: 994 - RNA, 18 nt, synthetic construct
  source 1..18: mol_type = other RNA
  modified_base 18: mod_base = OTHER; note = inverted deoxyribonucleotide
  modified_base 1: mod_base = OTHER; note = 2'-OMe modified nucleotide
  modified_base 3: mod_base = OTHER; note = 2'-OMe modified nucleotide
  modified_base 5: mod_base = OTHER; note = 2'-OMe modified nucleotide
  modified_base 7: mod_base = OTHER; note = 2'-OMe modified nucleotide
  modified_base 9: mod_base = OTHER; note = 2'-OMe modified nucleotide
  modified_base 11: mod_base = OTHER; note = 2'-OMe modified nucleotide
  modified_base 13: mod_base = OTHER; note = 2'-OMe modified nucleotide
  modified_base 15: mod_base = OTHER; note = 2'-OMe modified nucleotide
  modified_base 17: mod_base = OTHER; note = 2'-OMe modified nucleotide
  modified_base 2: mod_base = OTHER; note = 2-deoxy-2-fluoro ribonucleotide
  modified_base 4: mod_base = OTHER; note = 2-deoxy-2-fluoro ribonucleotide
  modified_base 6: mod_base = OTHER; note = 2-deoxy-2-fluoro ribonucleotide
  modified_base 8: mod_base = OTHER; note = 2-deoxy-2-fluoro ribonucleotide
  modified_base 10: mod_base = OTHER; note = 2-deoxy-2-fluoro ribonucleotide
  modified_base 12: mod_base = OTHER; note = 2-deoxy-2-fluoro ribonucleotide
  modified_base 14: mod_base = OTHER; note = 2-deoxy-2-fluoro ribonucleotide
  modified_base 16: mod_base = OTHER; note = 2-deoxy-2-fluoro ribonucleotide
  modified_base 1..2: mod_base = OTHER; note = phosphorothioate internucleotide linkage
  modified_base 2..3: mod_base = OTHER; note = phosphorothioate internucleotide linkage
caacctgacacaatgtca

SEQ ID NO: 995 - RNA, 18 nt, synthetic construct
  source 1..18: mol_type = other RNA
  modified_base 18: mod_base = OTHER; note = inverted deoxyribonucleotide
  modified_base 1: mod_base = OTHER; note = 2'-OMe modified nucleotide
  modified_base 3: mod_base = OTHER; note = 2'-OMe modified nucleotide
  modified_base 5: mod_base = OTHER; note = 2'-OMe modified nucleotide
  modified_base 7: mod_base = OTHER; note = 2'-OMe modified nucleotide
  modified_base 9: mod_base = OTHER; note = 2'-OMe modified nucleotide
  modified_base 11: mod_base = OTHER; note = 2'-OMe modified nucleotide
  modified_base 13: mod_base = OTHER; note = 2'-OMe modified nucleotide
  modified_base 15: mod_base = OTHER; note = 2'-OMe modified nucleotide
  modified_base 17: mod_base = OTHER; note = 2'-OMe modified nucleotide
  modified_base 2: mod_base = OTHER; note = 2-deoxy-2-fluoro ribonucleotide
  modified_base 4: mod_base = OTHER; note = 2-deoxy-2-fluoro ribonucleotide
  modified_base 6: mod_base = OTHER; note = 2-deoxy-2-fluoro ribonucleotide
  modified_base 8: mod_base = OTHER; note = 2-deoxy-2-fluoro ribonucleotide
  modified_base 10: mod_base = OTHER; note = 2-deoxy-2-fluoro ribonucleotide
  modified_base 12: mod_base = OTHER; note = 2-deoxy-2-fluoro ribonucleotide
  modified_base 14: mod_base = OTHER; note = 2-deoxy-2-fluoro ribonucleotide
  modified_base 16: mod_base = OTHER; note = 2-deoxy-2-fluoro ribonucleotide
  modified_base 1..2: mod_base = OTHER; note = phosphorothioate internucleotide linkage
  modified_base 2..3: mod_base = OTHER; note = phosphorothioate internucleotide linkage
tatcgaggctcattctca

SEQ ID NO: 996 - RNA, 18 nt, synthetic construct
  source 1..18: mol_type = other RNA
  modified_base 18: mod_base = OTHER; note = inverted deoxyribonucleotide
  modified_base 1: mod_base = OTHER; note = 2'-OMe modified nucleotide
  modified_base 3: mod_base = OTHER; note = 2'-OMe modified nucleotide
  modified_base 5: mod_base = OTHER; note = 2'-OMe modified nucleotide
  modified_base 7: mod_base = OTHER; note = 2'-OMe modified nucleotide
  modified_base 9: mod_base = OTHER; note = 2'-OMe modified nucleotide
  modified_base 11: mod_base = OTHER; note = 2'-OMe modified nucleotide
  modified_base 13: mod_base = OTHER; note = 2'-OMe modified nucleotide
  modified_base 15: mod_base = OTHER; note = 2'-OMe modified nucleotide
  modified_base 17: mod_base = OTHER; note = 2'-OMe modified nucleotide
  modified_base 2: mod_base = OTHER; note = 2-deoxy-2-fluoro ribonucleotide
  modified_base 4: mod_base = OTHER; note = 2-deoxy-2-fluoro ribonucleotide
  modified_base 6: mod_base = OTHER; note = 2-deoxy-2-fluoro ribonucleotide
  modified_base 8: mod_base = OTHER; note = 2-deoxy-2-fluoro ribonucleotide
  modified_base 10: mod_base = OTHER; note = 2-deoxy-2-fluoro ribonucleotide
  modified_base 12: mod_base = OTHER; note = 2-deoxy-2-fluoro ribonucleotide
  modified_base 14: mod_base = OTHER; note = 2-deoxy-2-fluoro ribonucleotide
  modified_base 16: mod_base = OTHER; note = 2-deoxy-2-fluoro ribonucleotide
  modified_base 1..2: mod_base = OTHER; note = phosphorothioate internucleotide linkage
  modified_base 2..3: mod_base = OTHER; note = phosphorothioate internucleotide linkage
gaatactacccaaatgga

SEQ ID NO: 997 - RNA, 18 nt, synthetic construct
  source 1..18: mol_type = other RNA
  modified_base 18: mod_base = OTHER; note = inverted deoxyribonucleotide
  modified_base 1: mod_base = OTHER; note = 2'-OMe modified nucleotide
  modified_base 3: mod_base = OTHER; note = 2'-OMe modified nucleotide
  modified_base 5: mod_base = OTHER; note = 2'-OMe modified nucleotide
  modified_base 7: mod_base = OTHER; note = 2'-OMe modified nucleotide
  modified_base 9: mod_base = OTHER; note = 2'-OMe modified nucleotide
  modified_base 11: mod_base = OTHER; note = 2'-OMe modified nucleotide
  modified_base 13: mod_base = OTHER; note = 2'-OMe modified nucleotide
  modified_base 15: mod_base = OTHER; note = 2'-OMe modified nucleotide
  modified_base 17: mod_base = OTHER; note = 2'-OMe modified nucleotide
  modified_base 2: mod_base = OTHER; note = 2-deoxy-2-fluoro ribonucleotide
  modified_base 4: mod_base = OTHER; note = 2-deoxy-2-fluoro ribonucleotide
  modified_base 6: mod_base = OTHER; note = 2-deoxy-2-fluoro ribonucleotide
  modified_base 8: mod_base = OTHER; note = 2-deoxy-2-fluoro ribonucleotide
  modified_base 10: mod_base = OTHER; note = 2-deoxy-2-fluoro ribonucleotide
  modified_base 12: mod_base = OTHER; note = 2-deoxy-2-fluoro ribonucleotide
  modified_base 14: mod_base = OTHER; note = 2-deoxy-2-fluoro ribonucleotide
  modified_base 16: mod_base = OTHER; note = 2-deoxy-2-fluoro ribonucleotide
  modified_base 1..2: mod_base = OTHER; note = phosphorothioate internucleotide linkage
  modified_base 2..3: mod_base = OTHER; note = phosphorothioate internucleotide linkage
atactacccaaatggtga

SEQ ID NO: 998 - RNA, 18 nt, synthetic construct
  source 1..18: mol_type = other RNA
  modified_base 18: mod_base = OTHER; note = inverted deoxyribonucleotide
  modified_base 1: mod_base = OTHER; note = 2'-OMe modified nucleotide
  modified_base 3: mod_base = OTHER; note = 2'-OMe modified nucleotide
  modified_base 5: mod_base = OTHER; note = 2'-OMe modified nucleotide
  modified_base 7: mod_base = OTHER; note = 2'-OMe modified nucleotide
  modified_base 9: mod_base = OTHER; note = 2'-OMe modified nucleotide
  modified_base 11: mod_base = OTHER; note = 2'-OMe modified nucleotide
  modified_base 13: mod_base = OTHER; note = 2'-OMe modified nucleotide
  modified_base 15: mod_base = OTHER; note = 2'-OMe modified nucleotide
  modified_base 17: mod_base = OTHER; note = 2'-OMe modified nucleotide
  modified_base 2: mod_base = OTHER; note = 2-deoxy-2-fluoro ribonucleotide
  modified_base 4: mod_base = OTHER; note = 2-deoxy-2-fluoro ribonucleotide
  modified_base 6: mod_base = OTHER; note = 2-deoxy-2-fluoro ribonucleotide
  modified_base 8: mod_base = OTHER; note = 2-deoxy-2-fluoro ribonucleotide
  modified_base 10: mod_base = OTHER; note = 2-deoxy-2-fluoro ribonucleotide
  modified_base 12: mod_base = OTHER; note = 2-deoxy-2-fluoro ribonucleotide
  modified_base 14: mod_base = OTHER; note = 2-deoxy-2-fluoro ribonucleotide
  modified_base 16: mod_base = OTHER; note = 2-deoxy-2-fluoro ribonucleotide
  modified_base 1..2: mod_base = OTHER; note = phosphorothioate internucleotide linkage
  modified_base 2..3: mod_base = OTHER; note = phosphorothioate internucleotide linkage
aaacagaatcaggtgtca

SEQ ID NO: 999 - RNA, 18 nt, synthetic construct
  source 1..18: mol_type = other RNA
  modified_base 18: mod_base = OTHER; note = inverted deoxyribonucleotide
  modified_base 1: mod_base = OTHER; note = 2'-OMe modified nucleotide
  modified_base 3: mod_base = OTHER; note = 2'-OMe modified nucleotide
  modified_base 5: mod_base = OTHER; note = 2'-OMe modified nucleotide
  modified_base 7: mod_base = OTHER; note = 2'-OMe modified nucleotide
  modified_base 9: mod_base = OTHER; note = 2'-OMe modified nucleotide
  modified_base 11: mod_base = OTHER; note = 2'-OMe modified nucleotide
  modified_base 13: mod_base = OTHER; note = 2'-OMe modified nucleotide
  modified_base 15: mod_base = OTHER; note = 2'-OMe modified nucleotide
  modified_base 17: mod_base = OTHER; note = 2'-OMe modified nucleotide
  modified_base 2: mod_base = OTHER; note = 2-deoxy-2-fluoro ribonucleotide
  modified_base 4: mod_base = OTHER; note = 2-deoxy-2-fluoro ribonucleotide
  modified_base 6: mod_base = OTHER; note = 2-deoxy-2-fluoro ribonucleotide
  modified_base 8: mod_base = OTHER; note = 2-deoxy-2-fluoro ribonucleotide
  modified_base 10: mod_base = OTHER; note = 2-deoxy-2-fluoro ribonucleotide
  modified_base 12: mod_base = OTHER; note = 2-deoxy-2-fluoro ribonucleotide
  modified_base 14: mod_base = OTHER; note = 2-deoxy-2-fluoro ribonucleotide
  modified_base 16: mod_base = OTHER; note = 2-deoxy-2-fluoro ribonucleotide
  modified_base 1..2: mod_base = OTHER; note = phosphorothioate internucleotide linkage
  modified_base 2..3: mod_base = OTHER; note = phosphorothioate internucleotide linkage
aacagaatcaggtgtcca

SEQ ID NO: 1000 - RNA, 17 nt, synthetic construct
  source 1..17: mol_type = other RNA
  modified_base 17: mod_base = OTHER; note = inverted deoxyribonucleotide
  modified_base 2: mod_base = OTHER; note = 2'-OMe modified nucleotide
  modified_base 4: mod_base = OTHER; note = 2'-OMe modified nucleotide
  modified_base 6: mod_base = OTHER; note = 2'-OMe modified nucleotide
  modified_base 8: mod_base = OTHER; note = 2'-OMe modified nucleotide
  modified_base 10: mod_base = OTHER; note = 2'-OMe modified nucleotide
  modified_base 12: mod_base = OTHER; note = 2'-OMe modified nucleotide
  modified_base 14: mod_base = OTHER; note = 2'-OMe modified nucleotide
  modified_base 16: mod_base = OTHER; note = 2'-OMe modified nucleotide
  modified_base 1: mod_base = OTHER; note = 2-deoxy-2-fluoro ribonucleotide
  modified_base 3: mod_base = OTHER; note = 2-deoxy-2-fluoro ribonucleotide
  modified_base 5: mod_base = OTHER; note = 2-deoxy-2-fluoro ribonucleotide
  modified_base 7: mod_base = OTHER; note = 2-deoxy-2-fluoro ribonucleotide
  modified_base 9: mod_base = OTHER; note = 2-deoxy-2-fluoro ribonucleotide
  modified_base 11: mod_base = OTHER; note = 2-deoxy-2-fluoro ribonucleotide
  modified_base 13: mod_base = OTHER; note = 2-deoxy-2-fluoro ribonucleotide
  modified_base 15: mod_base = OTHER; note = 2-deoxy-2-fluoro ribonucleotide
  modified_base 1..2: mod_base = OTHER; note = phosphorothioate internucleotide linkage
  modified_base 2..3: mod_base = OTHER; note = phosphorothioate internucleotide linkage
cagccccttattgttaa

SEQ ID NO: 1001 - RNA, 17 nt, synthetic construct
  source 1..17: mol_type = other RNA
  modified_base 17: mod_base = OTHER; note = inverted deoxyribonucleotide
  modified_base 2: mod_base = OTHER; note = 2'-OMe modified nucleotide
  modified_base 4: mod_base = OTHER; note = 2'-OMe modified nucleotide
  modified_base 6: mod_base = OTHER; note = 2'-OMe modified nucleotide
  modified_base 8: mod_base = OTHER; note = 2'-OMe modified nucleotide
  modified_base 10: mod_base = OTHER; note = 2'-OMe modified nucleotide
  modified_base 12: mod_base = OTHER; note = 2'-OMe modified nucleotide
  modified_base 14: mod_base = OTHER; note = 2'-OMe modified nucleotide
  modified_base 16: mod_base = OTHER; note = 2'-OMe modified nucleotide
  modified_base 1: mod_base = OTHER; note = 2-deoxy-2-fluoro ribonucleotide
  modified_base 3: mod_base = OTHER; note = 2-deoxy-2-fluoro ribonucleotide
  modified_base 5: mod_base = OTHER; note = 2-deoxy-2-fluoro ribonucleotide
  modified_base 7: mod_base = OTHER; note = 2-deoxy-2-fluoro ribonucleotide
  modified_base 9: mod_base = OTHER; note = 2-deoxy-2-fluoro ribonucleotide
  modified_base 11: mod_base = OTHER; note = 2-deoxy-2-fluoro ribonucleotide
  modified_base 13: mod_base = OTHER; note = 2-deoxy-2-fluoro ribonucleotide
  modified_base 15: mod_base = OTHER; note = 2-deoxy-2-fluoro ribonucleotide
  modified_base 1..2: mod_base = OTHER; note = phosphorothioate internucleotide linkage
  modified_base 2..3: mod_base = OTHER; note = phosphorothioate internucleotide linkage
ccccttattgttataca

SEQ ID NO: 1002 - RNA, 17 nt, synthetic construct
  source 1..17: mol_type = other RNA
  modified_base 17: mod_base = OTHER; note = inverted deoxyribonucleotide
  modified_base 2: mod_base = OTHER; note = 2'-OMe modified nucleotide
  modified_base 4: mod_base = OTHER; note = 2'-OMe modified nucleotide
  modified_base 6: mod_base = OTHER; note = 2'-OMe modified nucleotide
  modified_base 8: mod_base = OTHER; note = 2'-OMe modified nucleotide
  modified_base 10: mod_base = OTHER; note = 2'-OMe modified nucleotide
  modified_base 12: mod_base = OTHER; note = 2'-OMe modified nucleotide
  modified_base 14: mod_base = OTHER; note = 2'-OMe modified nucleotide
  modified_base 16: mod_base = OTHER; note = 2'-OMe modified nucleotide
  modified_base 1: mod_base = OTHER; note = 2-deoxy-2-fluoro ribonucleotide
  modified_base 3: mod_base = OTHER; note = 2-deoxy-2-fluoro ribonucleotide
  modified_base 5: mod_base = OTHER; note = 2-deoxy-2-fluoro ribonucleotide
  modified_base 7: mod_base = OTHER; note = 2-deoxy-2-fluoro ribonucleotide
  modified_base 9: mod_base = OTHER; note = 2-deoxy-2-fluoro ribonucleotide
  modified_base 11: mod_base = OTHER; note = 2-deoxy-2-fluoro ribonucleotide
  modified_base 13: mod_base = OTHER; note = 2-deoxy-2-fluoro ribonucleotide
  modified_base 15: mod_base = OTHER; note = 2-deoxy-2-fluoro ribonucleotide
  modified_base 1..2: mod_base = OTHER; note = phosphorothioate internucleotide linkage
  modified_base 2..3: mod_base = OTHER; note = phosphorothioate internucleotide linkage
cccttattgttatacga

SEQ ID NO: 1003 - RNA, 17 nt, synthetic construct
  source 1..17: mol_type = other RNA
  modified_base 17: mod_base = OTHER; note = inverted deoxyribonucleotide
  modified_base 2: mod_base = OTHER; note = 2'-OMe modified nucleotide
  modified_base 4: mod_base = OTHER; note = 2'-OMe modified nucleotide
  modified_base 6: mod_base = OTHER; note = 2'-OMe modified nucleotide
  modified_base 8: mod_base = OTHER; note = 2'-OMe modified nucleotide
  modified_base 10: mod_base = OTHER; note = 2'-OMe modified nucleotide
  modified_base 12: mod_base = OTHER; note = 2'-OMe modified nucleotide
  modified_base 14: mod_base = OTHER; note = 2'-OMe modified nucleotide
  modified_base 16: mod_base = OTHER; note = 2'-OMe modified nucleotide
  modified_base 1: mod_base = OTHER; note = 2-deoxy-2-fluoro ribonucleotide
  modified_base 3: mod_base = OTHER; note = 2-deoxy-2-fluoro ribonucleotide
  modified_base 5: mod_base = OTHER; note = 2-deoxy-2-fluoro ribonucleotide
  modified_base 7: mod_base = OTHER; note = 2-deoxy-2-fluoro ribonucleotide
  modified_base 9: mod_base = OTHER; note = 2-deoxy-2-fluoro ribonucleotide
  modified_base 11: mod_base = OTHER; note = 2-deoxy-2-fluoro ribonucleotide
  modified_base 13: mod_base = OTHER; note = 2-deoxy-2-fluoro ribonucleotide
  modified_base 15: mod_base = OTHER; note = 2-deoxy-2-fluoro ribonucleotide
  modified_base 1..2: mod_base = OTHER; note = phosphorothioate internucleotide linkage
  modified_base 2..3: mod_base = OTHER; note = phosphorothioate internucleotide linkage
cacaatgctcagacgca

SEQ ID NO: 1004 - RNA, 17 nt, synthetic construct
  source 1..17: mol_type = other RNA
  modified_base 17: mod_base = OTHER; note = inverted deoxyribonucleotide
  modified_base 2: mod_base = OTHER; note = 2'-OMe modified nucleotide
  modified_base 4: mod_base = OTHER; note = 2'-OMe modified nucleotide
  modified_base 6: mod_base = OTHER; note = 2'-OMe modified nucleotide
  modified_base 8: mod_base = OTHER; note = 2'-OMe modified nucleotide
  modified_base 10: mod_base = OTHER; note = 2'-OMe modified nucleotide
  modified_base 12: mod_base = OTHER; note = 2'-OMe modified nucleotide
  modified_base 14: mod_base = OTHER; note = 2'-OMe modified nucleotide
  modified_base 16: mod_base = OTHER; note = 2'-OMe modified nucleotide
  modified_base 1: mod_base = OTHER; note = 2-deoxy-2-fluoro ribonucleotide
  modified_base 3: mod_base = OTHER; note = 2-deoxy-2-fluoro ribonucleotide
  modified_base 5: mod_base = OTHER; note = 2-deoxy-2-fluoro ribonucleotide
  modified_base 7: mod_base = OTHER; note = 2-deoxy-2-fluoro ribonucleotide
  modified_base 9: mod_base = OTHER; note = 2-deoxy-2-fluoro ribonucleotide
  modified_base 11: mod_base = OTHER; note = 2-deoxy-2-fluoro ribonucleotide
  modified_base 13: mod_base = OTHER; note = 2-deoxy-2-fluoro ribonucleotide
  modified_base 15: mod_base = OTHER; note = 2-deoxy-2-fluoro ribonucleotide
  modified_base 1..2: mod_base = OTHER; note = phosphorothioate internucleotide linkage
  modified_base 2..3: mod_base = OTHER; note = phosphorothioate internucleotide linkage
acaatgctcagacgcaa

SEQ ID NO: 1005 - RNA, 17 nt, synthetic construct
  source 1..17: mol_type = other RNA
  modified_base 17: mod_base = OTHER; note = inverted deoxyribonucleotide
  modified_base 2: mod_base = OTHER; note = 2'-OMe modified nucleotide
  modified_base 4: mod_base = OTHER; note = 2'-OMe modified nucleotide
  modified_base 6: mod_base = OTHER; note = 2'-OMe modified nucleotide
  modified_base 8: mod_base = OTHER; note = 2'-OMe modified nucleotide
  modified_base 10: mod_base = OTHER; note = 2'-OMe modified nucleotide
  modified_base 12: mod_base = OTHER; note = 2'-OMe modified nucleotide
  modified_base 14: mod_base = OTHER; note = 2'-OMe modified nucleotide
  modified_base 16: mod_base = OTHER; note = 2'-OMe modified nucleotide
  modified_base 1: mod_base = OTHER; note = 2-deoxy-2-fluoro ribonucleotide
  modified_base 3: mod_base = OTHER; note = 2-deoxy-2-fluoro ribonucleotide
  modified_base 5: mod_base = OTHER; note = 2-deoxy-2-fluoro ribonucleotide
  modified_base 7: mod_base = OTHER; note = 2-deoxy-2-fluoro ribonucleotide
  modified_base 9: mod_base = OTHER; note = 2-deoxy-2-fluoro ribonucleotide
  modified_base 11: mod_base = OTHER; note = 2-deoxy-2-fluoro ribonucleotide
  modified_base 13: mod_base = OTHER; note = 2-deoxy-2-fluoro ribonucleotide
  modified_base 15: mod_base = OTHER; note = 2-deoxy-2-fluoro ribonucleotide
  modified_base 1..2: mod_base = OTHER; note = phosphorothioate internucleotide linkage
  modified_base 2..3: mod_base = OTHER; note = phosphorothioate internucleotide linkage
cgaaatccagatcctga

SEQ ID NO: 1006 - RNA, 17 nt, synthetic construct
  source 1..17: mol_type = other RNA
  modified_base 17: mod_base = OTHER; note = inverted deoxyribonucleotide
  modified_base 2: mod_base = OTHER; note = 2'-OMe modified nucleotide
  modified_base 4: mod_base = OTHER; note = 2'-OMe modified nucleotide
  modified_base 6: mod_base = OTHER; note = 2'-OMe modified nucleotide
  modified_base 8: mod_base = OTHER; note = 2'-OMe modified nucleotide
  modified_base 10: mod_base = OTHER; note = 2'-OMe modified nucleotide
  modified_base 12: mod_base = OTHER; note = 2'-OMe modified nucleotide
  modified_base 14: mod_base = OTHER; note = 2'-OMe modified nucleotide
  modified_base 16: mod_base = OTHER; note = 2'-OMe modified nucleotide
  modified_base 1: mod_base = OTHER; note = 2-deoxy-2-fluoro ribonucleotide
  modified_base 3: mod_base = OTHER; note = 2-deoxy-2-fluoro ribonucleotide
  modified_base 5: mod_base = OTHER; note = 2-deoxy-2-fluoro ribonucleotide
  modified_base 7: mod_base = OTHER; note = 2-deoxy-2-fluoro ribonucleotide
  modified_base 9: mod_base = OTHER; note = 2-deoxy-2-fluoro ribonucleotide
  modified_base 11: mod_base = OTHER; note = 2-deoxy-2-fluoro ribonucleotide
  modified_base 13: mod_base = OTHER; note = 2-deoxy-2-fluoro ribonucleotide
  modified_base 15: mod_base = OTHER; note = 2-deoxy-2-fluoro ribonucleotide
  modified_base 1..2: mod_base = OTHER; note = phosphorothioate internucleotide linkage
  modified_base 2..3: mod_base = OTHER; note = phosphorothioate internucleotide linkage
acgatgctcagatgcaa

SEQ ID NO: 1007 - RNA, 17 nt, synthetic construct
  source 1..17: mol_type = other RNA
  modified_base 17: mod_base = OTHER; note = inverted deoxyribonucleotide
  modified_base 2: mod_base = OTHER; note = 2'-OMe modified nucleotide
  modified_base 4: mod_base = OTHER; note = 2'-OMe modified nucleotide
  modified_base 6: mod_base = OTHER; note = 2'-OMe modified nucleotide
  modified_base 8: mod_base = OTHER; note = 2'-OMe modified nucleotide
  modified_base 10: mod_base = OTHER; note = 2'-OMe modified nucleotide
  modified_base 12: mod_base = OTHER; note = 2'-OMe modified nucleotide
  modified_base 14: mod_base = OTHER; note = 2'-OMe modified nucleotide
  modified_base 16: mod_base = OTHER; note = 2'-OMe modified nucleotide
  modified_base 1: mod_base = OTHER; note = 2-deoxy-2-fluoro ribonucleotide
  modified_base 3: mod_base = OTHER; note = 2-deoxy-2-fluoro ribonucleotide
  modified_base 5: mod_base = OTHER; note = 2-deoxy-2-fluoro ribonucleotide
  modified_base 7: mod_base = OTHER; note = 2-deoxy-2-fluoro ribonucleotide
  modified_base 9: mod_base = OTHER; note = 2-deoxy-2-fluoro ribonucleotide
  modified_base 11: mod_base = OTHER; note = 2-deoxy-2-fluoro ribonucleotide
  modified_base 13: mod_base = OTHER; note = 2-deoxy-2-fluoro ribonucleotide
  modified_base 15: mod_base = OTHER; note = 2-deoxy-2-fluoro ribonucleotide
  modified_base 1..2: mod_base = OTHER; note = phosphorothioate internucleotide linkage
  modified_base 2..3: mod_base = OTHER; note = phosphorothioate internucleotide linkage
cacaccagcatagtcga

SEQ ID NO: 1008 - RNA, 17 nt, synthetic construct
  source 1..17: mol_type = other RNA
  modified_base 17: mod_base = OTHER; note = inverted deoxyribonucleotide
  modified_base 2: mod_base = OTHER; note = 2'-OMe modified nucleotide
  modified_base 4: mod_base = OTHER; note = 2'-OMe modified nucleotide
  modified_base 6: mod_base = OTHER; note = 2'-OMe modified nucleotide
  modified_base 8: mod_base = OTHER; note = 2'-OMe modified nucleotide
  modified_base 10: mod_base = OTHER; note = 2'-OMe modified nucleotide
  modified_base 12: mod_base = OTHER; note = 2'-OMe modified nucleotide
  modified_base 14: mod_base = OTHER; note = 2'-OMe modified nucleotide
  modified_base 16: mod_base = OTHER; note = 2'-OMe modified nucleotide
  modified_base 1: mod_base = OTHER; note = 2-deoxy-2-fluoro ribonucleotide
  modified_base 3: mod_base = OTHER; note = 2-deoxy-2-fluoro ribonucleotide
  modified_base 5: mod_base = OTHER; note = 2-deoxy-2-fluoro ribonucleotide
  modified_base 7: mod_base = OTHER; note = 2-deoxy-2-fluoro ribonucleotide
  modified_base 9: mod_base = OTHER; note = 2-deoxy-2-fluoro ribonucleotide
  modified_base 11: mod_base = OTHER; note = 2-deoxy-2-fluoro ribonucleotide
  modified_base 13: mod_base = OTHER; note = 2-deoxy-2-fluoro ribonucleotide
  modified_base 15: mod_base = OTHER; note = 2-deoxy-2-fluoro ribonucleotide
  modified_base 1..2: mod_base = OTHER; note = phosphorothioate internucleotide linkage
  modified_base 2..3: mod_base = OTHER; note = phosphorothioate internucleotide linkage
agtcggaccccagaaaa

SEQ ID NO: 1009 - RNA, 17 nt, synthetic construct
  source 1..17: mol_type = other RNA
  modified_base 17: mod_base = OTHER; note = inverted deoxyribonucleotide
  modified_base 2: mod_base = OTHER; note = 2'-OMe modified nucleotide
  modified_base 4: mod_base = OTHER; note = 2'-OMe modified nucleotide
  modified_base 6: mod_base = OTHER; note = 2'-OMe modified nucleotide
  modified_base 8: mod_base = OTHER; note = 2'-OMe modified nucleotide
  modified_base 10: mod_base = OTHER; note = 2'-OMe modified nucleotide
  modified_base 12: mod_base = OTHER; note = 2'-OMe modified nucleotide
  modified_base 14: mod_base = OTHER; note = 2'-OMe modified nucleotide
  modified_base 16: mod_base = OTHER; note = 2'-OMe modified nucleotide
  modified_base 1: mod_base = OTHER; note = 2-deoxy-2-fluoro ribonucleotide
  modified_base 3: mod_base = OTHER; note = 2-deoxy-2-fluoro ribonucleotide
  modified_base 5: mod_base = OTHER; note = 2-deoxy-2-fluoro ribonucleotide
  modified_base 7: mod_base = OTHER; note = 2-deoxy-2-fluoro ribonucleotide
  modified_base 9: mod_base = OTHER; note = 2-deoxy-2-fluoro ribonucleotide
  modified_base 11: mod_base = OTHER; note = 2-deoxy-2-fluoro ribonucleotide
  modified_base 13: mod_base = OTHER; note = 2-deoxy-2-fluoro ribonucleotide
  modified_base 15: mod_base = OTHER; note = 2-deoxy-2-fluoro ribonucleotide
  modified_base 1..2: mod_base = OTHER; note = phosphorothioate internucleotide linkage
  modified_base 2..3: mod_base = OTHER; note = phosphorothioate internucleotide linkage
agatgctgagattcgca

SEQ ID NO: 1010 - RNA, 17 nt, synthetic construct
  source 1..17: mol_type = other RNA
  modified_base 17: mod_base = OTHER; note = inverted deoxyribonucleotide
  modified_base 2: mod_base = OTHER; note = 2'-OMe modified nucleotide
  modified_base 4: mod_base = OTHER; note = 2'-OMe modified nucleotide
  modified_base 6: mod_base = OTHER; note = 2'-OMe modified nucleotide
  modified_base 8: mod_base = OTHER; note = 2'-OMe modified nucleotide
  modified_base 10: mod_base = OTHER; note = 2'-OMe modified nucleotide
  modified_base 12: mod_base = OTHER; note = 2'-OMe modified nucleotide
  modified_base 14: mod_base = OTHER; note = 2'-OMe modified nucleotide
  modified_base 16: mod_base = OTHER; note = 2'-OMe modified nucleotide
  modified_base 1: mod_base = OTHER; note = 2-deoxy-2-fluoro ribonucleotide
  modified_base 3: mod_base = OTHER; note = 2-deoxy-2-fluoro ribonucleotide
  modified_base 5: mod_base = OTHER; note = 2-deoxy-2-fluoro ribonucleotide
  modified_base 7: mod_base = OTHER; note = 2-deoxy-2-fluoro ribonucleotide
  modified_base 9: mod_base = OTHER; note = 2-deoxy-2-fluoro ribonucleotide
  modified_base 11: mod_base = OTHER; note = 2-deoxy-2-fluoro ribonucleotide
  modified_base 13: mod_base = OTHER; note = 2-deoxy-2-fluoro ribonucleotide
  modified_base 15: mod_base = OTHER; note = 2-deoxy-2-fluoro ribonucleotide
  modified_base 1..2: mod_base = OTHER; note = phosphorothioate internucleotide linkage
  modified_base 2..3: mod_base = OTHER; note = phosphorothioate internucleotide linkage
atcaagtgtccttgcaa

SEQ ID NO: 1011 - RNA, 17 nt, synthetic construct
  source 1..17: mol_type = other RNA
  modified_base 17: mod_base = OTHER; note = inverted deoxyribonucleotide
  modified_base 2: mod_base = OTHER; note = 2'-OMe modified nucleotide
  modified_base 4: mod_base = OTHER; note = 2'-OMe modified nucleotide
  modified_base 6: mod_base = OTHER; note = 2'-OMe modified nucleotide
  modified_base 8: mod_base = OTHER; note = 2'-OMe modified nucleotide
  modified_base 10: mod_base = OTHER; note = 2'-OMe modified nucleotide
  modified_base 12: mod_base = OTHER; note = 2'-OMe modified nucleotide
  modified_base 14: mod_base = OTHER; note = 2'-OMe modified nucleotide
  modified_base 16: mod_base = OTHER; note = 2'-OMe modified nucleotide
  modified_base 1: mod_base = OTHER; note = 2-deoxy-2-fluoro ribonucleotide
  modified_base 3: mod_base = OTHER; note = 2-deoxy-2-fluoro ribonucleotide
  modified_base 5: mod_base = OTHER; note = 2-deoxy-2-fluoro ribonucleotide
  modified_base 7: mod_base = OTHER; note = 2-deoxy-2-fluoro ribonucleotide
  modified_base 9: mod_base = OTHER; note = 2-deoxy-2-fluoro ribonucleotide
  modified_base 11: mod_base = OTHER; note = 2-deoxy-2-fluoro ribonucleotide
  modified_base 13: mod_base = OTHER; note = 2-deoxy-2-fluoro ribonucleotide
  modified_base 15: mod_base = OTHER; note = 2-deoxy-2-fluoro ribonucleotide
  modified_base 1..2: mod_base = OTHER; note = phosphorothioate internucleotide linkage
  modified_base 2..3: mod_base = OTHER; note = phosphorothioate internucleotide linkage
gttatcgaggctcatta

SEQ ID NO: 1012 - RNA, 17 nt, synthetic construct
  source 1..17: mol_type = other RNA
  modified_base 17: mod_base = OTHER; note = inverted deoxyribonucleotide
  modified_base 2: mod_base = OTHER; note = 2'-OMe modified nucleotide
  modified_base 4: mod_base = OTHER; note = 2'-OMe modified nucleotide
  modified_base 6: mod_base = OTHER; note = 2'-OMe modified nucleotide
  modified_base 8: mod_base = OTHER; note = 2'-OMe modified nucleotide
  modified_base 10: mod_base = OTHER; note = 2'-OMe modified nucleotide
  modified_base 12: mod_base = OTHER; note = 2'-OMe modified nucleotide
  modified_base 14: mod_base = OTHER; note = 2'-OMe modified nucleotide
  modified_base 16: mod_base = OTHER; note = 2'-OMe modified nucleotide
  modified_base 1: mod_base = OTHER; note = 2-deoxy-2-fluoro ribonucleotide
  modified_base 3: mod_base = OTHER; note = 2-deoxy-2-fluoro ribonucleotide
  modified_base 5: mod_base = OTHER; note = 2-deoxy-2-fluoro ribonucleotide
  modified_base 7: mod_base = OTHER; note = 2-deoxy-2-fluoro ribonucleotide
  modified_base 9: mod_base = OTHER; note = 2-deoxy-2-fluoro ribonucleotide
  modified_base 11: mod_base = OTHER; note = 2-deoxy-2-fluoro ribonucleotide
  modified_base 13: mod_base = OTHER; note = 2-deoxy-2-fluoro ribonucleotide
  modified_base 15: mod_base = OTHER; note = 2-deoxy-2-fluoro ribonucleotide
  modified_base 1..2: mod_base = OTHER; note = phosphorothioate internucleotide linkage
  modified_base 2..3: mod_base = OTHER; note = phosphorothioate internucleotide linkage
ttatcgaggctcattca

SEQ ID NO: 1013 - RNA, 17 nt, synthetic construct
  source 1..17: mol_type = other RNA
  modified_base 17: mod_base = OTHER; note = inverted deoxyribonucleotide
  modified_base 2: mod_base = OTHER; note = 2'-OMe modified nucleotide
  modified_base 4: mod_base = OTHER; note = 2'-OMe modified nucleotide
  modified_base 6: mod_base = OTHER; note = 2'-OMe modified nucleotide
  modified_base 8: mod_base = OTHER; note = 2'-OMe modified nucleotide
  modified_base 10: mod_base = OTHER; note = 2'-OMe modified nucleotide
  modified_base 12: mod_base = OTHER; note = 2'-OMe modified nucleotide
  modified_base 14: mod_base = OTHER; note = 2'-OMe modified nucleotide
  modified_base 16: mod_base = OTHER; note = 2'-OMe modified nucleotide
  modified_base 1: mod_base = OTHER; note = 2-deoxy-2-fluoro ribonucleotide
  modified_base 3: mod_base = OTHER; note = 2-deoxy-2-fluoro ribonucleotide
  modified_base 5: mod_base = OTHER; note = 2-deoxy-2-fluoro ribonucleotide
  modified_base 7: mod_base = OTHER; note = 2-deoxy-2-fluoro ribonucleotide
  modified_base 9: mod_base = OTHER; note = 2-deoxy-2-fluoro ribonucleotide
  modified_base 11: mod_base = OTHER; note = 2-deoxy-2-fluoro ribonucleotide
  modified_base 13: mod_base = OTHER; note = 2-deoxy-2-fluoro ribonucleotide
  modified_base 15: mod_base = OTHER; note = 2-deoxy-2-fluoro ribonucleotide
  modified_base 1..2: mod_base = OTHER; note = phosphorothioate internucleotide linkage
  modified_base 2..3: mod_base = OTHER; note = phosphorothioate internucleotide linkage
aacctgacacaatgtca

SEQ ID NO: 1014 - RNA, 17 nt, synthetic construct
  source 1..17: mol_type = other RNA
  modified_base 17: mod_base = OTHER; note = inverted deoxyribonucleotide
  modified_base 2: mod_base = OTHER; note = 2'-OMe modified nucleotide
  modified_base 4: mod_base = OTHER; note = 2'-OMe modified nucleotide
  modified_base 6: mod_base = OTHER; note = 2'-OMe modified nucleotide
  modified_base 8: mod_base = OTHER; note = 2'-OMe modified nucleotide
  modified_base 10: mod_base = OTHER; note = 2'-OMe modified nucleotide
  modified_base 12: mod_base = OTHER; note = 2'-OMe modified nucleotide
  modified_base 14: mod_base = OTHER; note = 2'-OMe modified nucleotide
  modified_base 16: mod_base = OTHER; note = 2'-OMe modified nucleotide
  modified_base 1: mod_base = OTHER; note = 2-deoxy-2-fluoro ribonucleotide
  modified_base 3: mod_base = OTHER; note = 2-deoxy-2-fluoro ribonucleotide
  modified_base 5: mod_base = OTHER; note = 2-deoxy-2-fluoro ribonucleotide
  modified_base 7: mod_base = OTHER; note = 2-deoxy-2-fluoro ribonucleotide
  modified_base 9: mod_base = OTHER; note = 2-deoxy-2-fluoro ribonucleotide
  modified_base 11: mod_base = OTHER; note = 2-deoxy-2-fluoro ribonucleotide
  modified_base 13: mod_base = OTHER; note = 2-deoxy-2-fluoro ribonucleotide
  modified_base 15: mod_base = OTHER; note = 2-deoxy-2-fluoro ribonucleotide
  modified_base 1..2: mod_base = OTHER; note = phosphorothioate internucleotide linkage
  modified_base 2..3: mod_base = OTHER; note = phosphorothioate internucleotide linkage
atcgaggctcattctca

SEQ ID NO: 1015 - RNA, 17 nt, synthetic construct
  source 1..17: mol_type = other RNA
  modified_base 17: mod_base = OTHER; note = inverted deoxyribonucleotide
  modified_base 2: mod_base = OTHER; note = 2'-OMe modified nucleotide
  modified_base 4: mod_base = OTHER; note = 2'-OMe modified nucleotide
  modified_base 6: mod_base = OTHER; note = 2'-OMe modified nucleotide
  modified_base 8: mod_base = OTHER; note = 2'-OMe modified nucleotide
  modified_base 10: mod_base = OTHER; note = 2'-OMe modified nucleotide
  modified_base 12: mod_base = OTHER; note = 2'-OMe modified nucleotide
  modified_base 14: mod_base = OTHER; note = 2'-OMe modified nucleotide
  modified_base 16: mod_base = OTHER; note = 2'-OMe modified nucleotide
  modified_base 1: mod_base = OTHER; note = 2-deoxy-2-fluoro ribonucleotide
  modified_base 3: mod_base = OTHER; note = 2-deoxy-2-fluoro ribonucleotide
  modified_base 5: mod_base = OTHER; note = 2-deoxy-2-fluoro ribonucleotide
  modified_base 7: mod_base = OTHER; note = 2-deoxy-2-fluoro ribonucleotide
  modified_base 9: mod_base = OTHER; note = 2-deoxy-2-fluoro ribonucleotide
  modified_base 11: mod_base = OTHER; note = 2-deoxy-2-fluoro ribonucleotide
  modified_base 13: mod_base = OTHER; note = 2-deoxy-2-fluoro ribonucleotide
  modified_base 15: mod_base = OTHER; note = 2-deoxy-2-fluoro ribonucleotide
  modified_base 1..2: mod_base = OTHER; note = phosphorothioate internucleotide linkage
  modified_base 2..3: mod_base = OTHER; note = phosphorothioate internucleotide linkage
aatactacccaaatgga

SEQ ID NO: 1016 - RNA, 17 nt, synthetic construct
  source 1..17: mol_type = other RNA
  modified_base 17: mod_base = OTHER; note = inverted deoxyribonucleotide
  modified_base 2: mod_base = OTHER; note = 2'-OMe modified nucleotide
  modified_base 4: mod_base = OTHER; note = 2'-OMe modified nucleotide
  modified_base 6: mod_base = OTHER; note = 2'-OMe modified nucleotide
  modified_base 8: mod_base = OTHER; note = 2'-OMe modified nucleotide
  modified_base 10: mod_base = OTHER; note = 2'-OMe modified nucleotide
  modified_base 12: mod_base = OTHER; note = 2'-OMe modified nucleotide
  modified_base 14: mod_base = OTHER; note = 2'-OMe modified nucleotide
  modified_base 16: mod_base = OTHER; note = 2'-OMe modified nucleotide
  modified_base 1: mod_base = OTHER; note = 2-deoxy-2-fluoro ribonucleotide
  modified_base 3: mod_base = OTHER; note = 2-deoxy-2-fluoro ribonucleotide
  modified_base 5: mod_base = OTHER; note = 2-deoxy-2-fluoro ribonucleotide
  modified_base 7: mod_base = OTHER; note = 2-deoxy-2-fluoro ribonucleotide
  modified_base 9: mod_base = OTHER; note = 2-deoxy-2-fluoro ribonucleotide
  modified_base 11: mod_base = OTHER; note = 2-deoxy-2-fluoro ribonucleotide
  modified_base 13: mod_base = OTHER; note = 2-deoxy-2-fluoro ribonucleotide
  modified_base 15: mod_base = OTHER; note = 2-deoxy-2-fluoro ribonucleotide
  modified_base 1..2: mod_base = OTHER; note = phosphorothioate internucleotide linkage
  modified_base 2..3: mod_base = OTHER; note = phosphorothioate internucleotide linkage
tactacccaaatggtga

SEQ ID NO: 1017 - RNA, 17 nt, synthetic construct
  source 1..17: mol_type = other RNA
  modified_base 17: mod_base = OTHER; note = inverted deoxyribonucleotide
  modified_base 2: mod_base = OTHER; note = 2'-OMe modified nucleotide
  modified_base 4: mod_base = OTHER; note = 2'-OMe modified nucleotide
  modified_base 6: mod_base = OTHER; note = 2'-OMe modified nucleotide
  modified_base 8: mod_base = OTHER; note = 2'-OMe modified nucleotide
  modified_base 10: mod_base = OTHER; note = 2'-OMe modified nucleotide
  modified_base 12: mod_base = OTHER; note = 2'-OMe modified nucleotide
  modified_base 14: mod_base = OTHER; note = 2'-OMe modified nucleotide
  modified_base 16: mod_base = OTHER; note = 2'-OMe modified nucleotide
  modified_base 1: mod_base = OTHER; note = 2-deoxy-2-fluoro ribonucleotide
  modified_base 3: mod_base = OTHER; note = 2-deoxy-2-fluoro ribonucleotide
  modified_base 5: mod_base = OTHER; note = 2-deoxy-2-fluoro ribonucleotide
  modified_base 7: mod_base = OTHER; note = 2-deoxy-2-fluoro ribonucleotide
  modified_base 9: mod_base = OTHER; note = 2-deoxy-2-fluoro ribonucleotide
  modified_base 11: mod_base = OTHER; note = 2-deoxy-2-fluoro ribonucleotide
  modified_base 13: mod_base = OTHER; note = 2-deoxy-2-fluoro ribonucleotide
  modified_base 15: mod_base = OTHER; note = 2-deoxy-2-fluoro ribonucleotide
  modified_base 1..2: mod_base = OTHER; note = phosphorothioate internucleotide linkage
  modified_base 2..3: mod_base = OTHER; note = phosphorothioate internucleotide linkage
aacagaatcaggtgtca

SEQ ID NO: 1018 - RNA, 17 nt, synthetic construct
  source 1..17: mol_type = other RNA
  modified_base 17: mod_base = OTHER; note = inverted deoxyribonucleotide
  modified_base 2: mod_base = OTHER; note = 2'-OMe modified nucleotide
  modified_base 4: mod_base = OTHER; note = 2'-OMe modified nucleotide
  modified_base 6: mod_base = OTHER; note = 2'-OMe modified nucleotide
  modified_base 8: mod_base = OTHER; note = 2'-OMe modified nucleotide
  modified_base 10: mod_base = OTHER; note = 2'-OMe modified nucleotide
  modified_base 12: mod_base = OTHER; note = 2'-OMe modified nucleotide
  modified_base 14: mod_base = OTHER; note = 2'-OMe modified nucleotide
  modified_base 16: mod_base = OTHER; note = 2'-OMe modified nucleotide
  modified_base 1: mod_base = OTHER; note = 2-deoxy-2-fluoro ribonucleotide
  modified_base 3: mod_base = OTHER; note = 2-deoxy-2-fluoro ribonucleotide
  modified_base 5: mod_base = OTHER; note = 2-deoxy-2-fluoro ribonucleotide
  modified_base 7: mod_base = OTHER; note = 2-deoxy-2-fluoro ribonucleotide
  modified_base 9: mod_base = OTHER; note = 2-deoxy-2-fluoro ribonucleotide
  modified_base 11: mod_base = OTHER; note = 2-deoxy-2-fluoro ribonucleotide
  modified_base 13: mod_base = OTHER; note = 2-deoxy-2-fluoro ribonucleotide
  modified_base 15: mod_base = OTHER; note = 2-deoxy-2-fluoro ribonucleotide
  modified_base 1..2: mod_base = OTHER; note = phosphorothioate internucleotide linkage
  modified_base 2..3: mod_base = OTHER; note = phosphorothioate internucleotide linkage
acagaatcaggtgtcca

SEQ ID NO: 1019 - RNA, 26 nt, synthetic construct
  source 1..26: mol_type = other RNA
  modified_base 1: mod_base = OTHER; note = 2'-OMe modified nucleotide
  modified_base 3: mod_base = OTHER; note = 2'-OMe modified nucleotide
  modified_base 5: mod_base = OTHER; note = 2'-OMe modified nucleotide
  modified_base 7: mod_base = OTHER; note = 2'-OMe modified nucleotide
  modified_base 9..11: mod_base = OTHER; note = 2'-OMe modified nucleotide
  modified_base 13: mod_base = OTHER; note = 2'-OMe modified nucleotide
  modified_base 17: mod_base = OTHER; note = 2'-OMe modified nucleotide
  modified_base 19: mod_base = OTHER; note = 2'-OMe modified nucleotide
  modified_base 21: mod_base = OTHER; note = 2'-OMe modified nucleotide
  modified_base 23: mod_base = OTHER; note = 2'-OMe modified nucleotide
  modified_base 25: mod_base = OTHER; note = 2'-OMe modified nucleotide
  modified_base 6: mod_base = OTHER; note = 2-deoxy-2-fluoro ribonucleotide
  modified_base 8: mod_base = OTHER; note = 2-deoxy-2-fluoro ribonucleotide
  modified_base 12: mod_base = OTHER; note = 2-deoxy-2-fluoro ribonucleotide
  modified_base 14..16: mod_base = OTHER; note = 2-deoxy-2-fluoro ribonucleotide
  modified_base 18: mod_base = OTHER; note = 2-deoxy-2-fluoro ribonucleotide
  modified_base 20: mod_base = OTHER; note = 2-deoxy-2-fluoro ribonucleotide
  modified_base 22: mod_base = OTHER; note = 2-deoxy-2-fluoro ribonucleotide
  modified_base 24: mod_base = OTHER; note = 2-deoxy-2-fluoro ribonucleotide
  modified_base 26: mod_base = OTHER; note = 2-deoxy-2-fluoro ribonucleotide
  modified_base 5..6: mod_base = OTHER; note = phosphorothioate internucleotide linkage
  modified_base 6..7: mod_base = OTHER; note = phosphorothioate internucleotide linkage
tatatagttatcgaggctcattctca

SEQ ID NO: 1020 - RNA, 26 nt, synthetic construct
  source 1..26: mol_type = other RNA
  modified_base 1: mod_base = OTHER; note = 2'-OMe modified nucleotide
  modified_base 3: mod_base = OTHER; note = 2'-OMe modified nucleotide
  modified_base 5..13: mod_base = OTHER; note = 2'-OMe modified nucleotide
  modified_base 15: mod_base = OTHER; note = 2'-OMe modified nucleotide
  modified_base 17..26: mod_base = OTHER; note = 2'-OMe modified nucleotide
  modified_base 14: mod_base = OTHER; note = 2-deoxy-2-fluoro ribonucleotide
  modified_base 16: mod_base = OTHER; note = 2-deoxy-2-fluoro ribonucleotide
  modified_base 5..6: mod_base = OTHER; note = phosphorothioate internucleotide linkage
  modified_base 6..7: mod_base = OTHER; note = phosphorothioate internucleotide linkage
tatatagttatcgaggctcattctca

SEQ ID NO: 1021 - RNA, 26 nt, synthetic construct
  source 1..26: mol_type = other RNA
  modified_base 1: mod_base = OTHER; note = 2'-OMe modified nucleotide
  modified_base 3: mod_base = OTHER; note = 2'-OMe modified nucleotide
  modified_base 5..14: mod_base = OTHER; note = 2'-OMe modified nucleotide
  modified_base 17..26: mod_base = OTHER; note = 2'-OMe modified nucleotide
  modified_base 15..16: mod_base = OTHER; note = 2-deoxy-2-fluoro ribonucleotide
  modified_base 5..6: mod_base = OTHER; note = phosphorothioate internucleotide linkage
  modified_base 6..7: mod_base = OTHER; note = phosphorothioate internucleotide linkage
tatatagttatcgaggctcattctca

SEQ ID NO: 1022 - RNA, 26 nt, synthetic construct
  source 1..26: mol_type = other RNA
  modified_base 1: mod_base = OTHER; note = 2'-OMe modified nucleotide
  modified_base 3: mod_base = OTHER; note = 2'-OMe modified nucleotide
  modified_base 5..11: mod_base = OTHER; note = 2'-OMe modified nucleotide
  modified_base 13..14: mod_base = OTHER; note = 2'-OMe modified nucleotide
  modified_base 17: mod_base = OTHER; note = 2'-OMe modified nucleotide
  modified_base 19..26: mod_base = OTHER; note = 2'-OMe modified nucleotide
  modified_base 12: mod_base = OTHER; note = 2-deoxy-2-fluoro ribonucleotide
  modified_base 15..16: mod_base = OTHER; note = 2-deoxy-2-fluoro ribonucleotide
  modified_base 18: mod_base = OTHER; note = 2-deoxy-2-fluoro ribonucleotide
  modified_base 5..6: mod_base = OTHER; note = phosphorothioate internucleotide linkage
  modified_base 6..7: mod_base = OTHER; note = phosphorothioate internucleotide linkage
tatatcagaaacagaatcaggtgtca

SEQ ID NO: 1023 - RNA, 26 nt, synthetic construct
  source 1..26: mol_type = other RNA
  modified_base 1: mod_base = OTHER; note = 2'-OMe modified nucleotide
  modified_base 3: mod_base = OTHER; note = 2'-OMe modified nucleotide
  modified_base 5..11: mod_base = OTHER; note = 2'-OMe modified nucleotide
  modified_base 13: mod_base = OTHER; note = 2'-OMe modified nucleotide
  modified_base 15: mod_base = OTHER; note = 2'-OMe modified nucleotide
  modified_base 17: mod_base = OTHER; note = 2'-OMe modified nucleotide
  modified_base 19..26: mod_base = OTHER; note = 2'-OMe modified nucleotide
  modified_base 12: mod_base = OTHER; note = 2-deoxy-2-fluoro ribonucleotide
  modified_base 14: mod_base = OTHER; note = 2-deoxy-2-fluoro ribonucleotide
  modified_base 16: mod_base = OTHER; note = 2-deoxy-2-fluoro ribonucleotide
  modified_base 18: mod_base = OTHER; note = 2-deoxy-2-fluoro ribonucleotide
  modified_base 5..6: mod_base = OTHER; note = phosphorothioate internucleotide linkage
  modified_base 6..7: mod_base = OTHER; note = phosphorothioate internucleotide linkage
tatatcagaaacagaatcaggtgtca

SEQ ID NO: 1024 - RNA, 26 nt, synthetic construct
  source 1..26: mol_type = other RNA
  modified_base 1: mod_base = OTHER; note = 2'-OMe modified nucleotide
  modified_base 3: mod_base = OTHER; note = 2'-OMe modified nucleotide
  modified_base 5..13: mod_base = OTHER; note = 2'-OMe modified nucleotide
  modified_base 15: mod_base = OTHER; note = 2'-OMe modified nucleotide
  modified_base 17..26: mod_base = OTHER; note = 2'-OMe modified nucleotide
  modified_base 14: mod_base = OTHER; note = 2-deoxy-2-fluoro ribonucleotide
  modified_base 16: mod_base = OTHER; note = 2-deoxy-2-fluoro ribonucleotide
  modified_base 5..6: mod_base = OTHER; note = phosphorothioate internucleotide linkage
  modified_base 6..7: mod_base = OTHER; note = phosphorothioate internucleotide linkage
tatatcagaaacagaatcaggtgtca

SEQ ID NO: 1025 - RNA, 26 nt, synthetic construct
  source 1..26: mol_type = other RNA
  modified_base 1: mod_base = OTHER; note = 2'-OMe modified nucleotide
  modified_base 3: mod_base = OTHER; note = 2'-OMe modified nucleotide
  modified_base 5..14: mod_base = OTHER; note = 2'-OMe modified nucleotide
  modified_base 17..26: mod_base = OTHER; note = 2'-OMe modified nucleotide
  modified_base 15..16: mod_base = OTHER; note = 2-deoxy-2-fluoro ribonucleotide
  modified_base 5..6: mod_base = OTHER; note = phosphorothioate internucleotide linkage
  modified_base 6..7: mod_base = OTHER; note = phosphorothioate internucleotide linkage
tatatcagaaacagaatcaggtgtca

SEQ ID NO: 1026 - RNA, 26 nt, synthetic construct
  source 1..26: mol_type = other RNA
  modified_base 1: mod_base = OTHER; note = 2'-OMe modified nucleotide
  modified_base 3: mod_base = OTHER; note = 2'-OMe modified nucleotide
  modified_base 5: mod_base = OTHER; note = 2'-OMe modified nucleotide
  modified_base 7: mod_base = OTHER; note = 2'-OMe modified nucleotide
  modified_base 9: mod_base = OTHER; note = 2'-OMe modified nucleotide
  modified_base 11: mod_base = OTHER; note = 2'-OMe modified nucleotide
  modified_base 13: mod_base = OTHER; note = 2'-OMe modified nucleotide
  modified_base 17: mod_base = OTHER; note = 2'-OMe modified nucleotide
  modified_base 19: mod_base = OTHER; note = 2'-OMe modified nucleotide
  modified_base 21: mod_base = OTHER; note = 2'-OMe modified nucleotide
  modified_base 23: mod_base = OTHER; note = 2'-OMe modified nucleotide
  modified_base 25: mod_base = OTHER; note = 2'-OMe modified nucleotide
  modified_base 6: mod_base = OTHER; note = 2-deoxy-2-fluoro ribonucleotide
  modified_base 8: mod_base = OTHER; note = 2-deoxy-2-fluoro ribonucleotide
  modified_base 10: mod_base = OTHER; note = 2-deoxy-2-fluoro ribonucleotide
  modified_base 12: mod_base = OTHER; note = 2-deoxy-2-fluoro ribonucleotide
  modified_base 14..16: mod_base = OTHER; note = 2-deoxy-2-fluoro ribonucleotide
  modified_base 18: mod_base = OTHER; note = 2-deoxy-2-fluoro ribonucleotide
  modified_base 20: mod_base = OTHER; note = 2-deoxy-2-fluoro ribonucleotide
  modified_base 22: mod_base = OTHER; note = 2-deoxy-2-fluoro ribonucleotide
  modified_base 24: mod_base = OTHER; note = 2-deoxy-2-fluoro ribonucleotide
  modified_base 26: mod_base = OTHER; note = 2-deoxy-2-fluoro ribonucleotide
  modified_base 5..6: mod_base = OTHER; note = phosphorothioate internucleotide linkage
  modified_base 6..7: mod_base = OTHER; note = phosphorothioate internucleotide linkage
tatatcagaaacagaatcaggtgtca

SEQ ID NO: 1027 - RNA, 26 nt, synthetic construct
  source 1..26: mol_type = other RNA
  modified_base 1: mod_base = OTHER; note = 2'-OMe modified nucleotide
  modified_base 3: mod_base = OTHER; note = 2'-OMe modified nucleotide
  modified_base 5: mod_base = OTHER; note = 2'-OMe modified nucleotide
  modified_base 7..9: mod_base = OTHER; note = 2'-OMe modified nucleotide
  modified_base 11: mod_base = OTHER; note = 2'-OMe modified nucleotide
  modified_base 13: mod_base = OTHER; note = 2'-OMe modified nucleotide
  modified_base 17: mod_base = OTHER; note = 2'-OMe modified nucleotide
  modified_base 19: mod_base = OTHER; note = 2'-OMe modified nucleotide
  modified_base 21: mod_base = OTHER; note = 2'-OMe modified nucleotide
  modified_base 23: mod_base = OTHER; note = 2'-OMe modified nucleotide
  modified_base 25: mod_base = OTHER; note = 2'-OMe modified nucleotide
  modified_base 6: mod_base = OTHER; note = 2-deoxy-2-fluoro ribonucleotide
  modified_base 10: mod_base = OTHER; note = 2-deoxy-2-fluoro ribonucleotide
  modified_base 12: mod_base = OTHER; note = 2-deoxy-2-fluoro ribonucleotide
  modified_base 14..16: mod_base = OTHER; note = 2-deoxy-2-fluoro ribonucleotide
  modified_base 18: mod_base = OTHER; note = 2-deoxy-2-fluoro ribonucleotide
  modified_base 20: mod_base = OTHER; note = 2-deoxy-2-fluoro ribonucleotide
  modified_base 22: mod_base = OTHER; note = 2-deoxy-2-fluoro ribonucleotide
  modified_base 24: mod_base = OTHER; note = 2-deoxy-2-fluoro ribonucleotide
  modified_base 26: mod_base = OTHER; note = 2-deoxy-2-fluoro ribonucleotide
  modified_base 5..6: mod_base = OTHER; note = phosphorothioate internucleotide linkage
  modified_base 6..7: mod_base = OTHER; note = phosphorothioate internucleotide linkage
tatatcagaaacagaatcaggtgtca

SEQ ID NO: 1028 - RNA, 26 nt, synthetic construct
  source 1..26: mol_type = other RNA
  modified_base 1: mod_base = OTHER; note = 2'-OMe modified nucleotide
  modified_base 3: mod_base = OTHER; note = 2'-OMe modified nucleotide
  modified_base 5: mod_base = OTHER; note = 2'-OMe modified nucleotide
  modified_base 7..11: mod_base = OTHER; note = 2'-OMe modified nucleotide
  modified_base 13: mod_base = OTHER; note = 2'-OMe modified nucleotide
  modified_base 17: mod_base = OTHER; note = 2'-OMe modified nucleotide
  modified_base 19: mod_base = OTHER; note = 2'-OMe modified nucleotide
  modified_base 21: mod_base = OTHER; note = 2'-OMe modified nucleotide
  modified_base 23: mod_base = OTHER; note = 2'-OMe modified nucleotide
  modified_base 25: mod_base = OTHER; note = 2'-OMe modified nucleotide
  modified_base 6: mod_base = OTHER; note = 2-deoxy-2-fluoro ribonucleotide
  modified_base 12: mod_base = OTHER; note = 2-deoxy-2-fluoro ribonucleotide
  modified_base 14..16: mod_base = OTHER; note = 2-deoxy-2-fluoro ribonucleotide
  modified_base 18: mod_base = OTHER; note = 2-deoxy-2-fluoro ribonucleotide
  modified_base 20: mod_base = OTHER; note = 2-deoxy-2-fluoro ribonucleotide
  modified_base 22: mod_base = OTHER; note = 2-deoxy-2-fluoro ribonucleotide
  modified_base 24: mod_base = OTHER; note = 2-deoxy-2-fluoro ribonucleotide
  modified_base 26: mod_base = OTHER; note = 2-deoxy-2-fluoro ribonucleotide
  modified_base 5..6: mod_base = OTHER; note = phosphorothioate internucleotide linkage
  modified_base 6..7: mod_base = OTHER; note = phosphorothioate internucleotide linkage
tatatcagaaacagaatcaggtgtca

SEQ ID NO: 1029 - RNA, 26 nt, synthetic construct
  source 1..26: mol_type = other RNA
  modified_base 1: mod_base = OTHER; note = 2'-OMe modified nucleotide
  modified_base 3: mod_base = OTHER; note = 2'-OMe modified nucleotide
  modified_base 5: mod_base = OTHER; note = 2'-OMe modified nucleotide
  modified_base 7..11: mod_base = OTHER; note = 2'-OMe modified nucleotide
  modified_base 13..15: mod_base = OTHER; note = 2'-OMe modified nucleotide
  modified_base 17: mod_base = OTHER; note = 2'-OMe modified nucleotide
  modified_base 19..21: mod_base = OTHER; note = 2'-OMe modified nucleotide
  modified_base 23: mod_base = OTHER; note = 2'-OMe modified nucleotide
  modified_base 25: mod_base = OTHER; note = 2'-OMe modified nucleotide
  modified_base 6: mod_base = OTHER; note = 2-deoxy-2-fluoro ribonucleotide
  modified_base 12: mod_base = OTHER; note = 2-deoxy-2-fluoro ribonucleotide
  modified_base 16: mod_base = OTHER; note = 2-deoxy-2-fluoro ribonucleotide
  modified_base 18: mod_base = OTHER; note = 2-deoxy-2-fluoro ribonucleotide
  modified_base 22: mod_base = OTHER; note = 2-deoxy-2-fluoro ribonucleotide
  modified_base 24: mod_base = OTHER; note = 2-deoxy-2-fluoro ribonucleotide
  modified_base 26: mod_base = OTHER; note = 2-deoxy-2-fluoro ribonucleotide
  modified_base 5..6: mod_base = OTHER; note = phosphorothioate internucleotide linkage
  modified_base 6..7: mod_base = OTHER; note = phosphorothioate internucleotide linkage
tatatcagaaacagaatcaggtgtca

SEQ ID NO: 1030 - RNA, 26 nt, synthetic construct
  source 1..26: mol_type = other RNA
  modified_base 1: mod_base = OTHER; note = 2'-OMe modified nucleotide
  modified_base 3: mod_base = OTHER; note = 2'-OMe modified nucleotide
  modified_base 5: mod_base = OTHER; note = 2'-OMe modified nucleotide
  modified_base 7: mod_base = OTHER; note = 2'-OMe modified nucleotide
  modified_base 9: mod_base = OTHER; note = 2'-OMe modified nucleotide
  modified_base 11: mod_base = OTHER; note = 2'-OMe modified nucleotide
  modified_base 13: mod_base = OTHER; note = 2'-OMe modified nucleotide
  modified_base 17: mod_base = OTHER; note = 2'-OMe modified nucleotide
  modified_base 19..20: mod_base = OTHER; note = 2'-OMe modified nucleotide
  modified_base 22: mod_base = OTHER; note = 2'-OMe modified nucleotide
  modified_base 24..25: mod_base = OTHER; note = 2'-OMe modified nucleotide
  modified_base 6: mod_base = OTHER; note = 2-deoxy-2-fluoro ribonucleotide
  modified_base 8: mod_base = OTHER; note = 2-deoxy-2-fluoro ribonucleotide
  modified_base 10: mod_base = OTHER; note = 2-deoxy-2-fluoro ribonucleotide
  modified_base 12: mod_base = OTHER; note = 2-deoxy-2-fluoro ribonucleotide
  modified_base 14..16: mod_base = OTHER; note = 2-deoxy-2-fluoro ribonucleotide
  modified_base 18: mod_base = OTHER; note = 2-deoxy-2-fluoro ribonucleotide
  modified_base 21: mod_base = OTHER; note = 2-deoxy-2-fluoro ribonucleotide
  modified_base 23: mod_base = OTHER; note = 2-deoxy-2-fluoro ribonucleotide
  modified_base 26: mod_base = OTHER; note = 2-deoxy-2-fluoro ribonucleotide
  modified_base 5..6: mod_base = OTHER; note = phosphorothioate internucleotide linkage
  modified_base 6..7: mod_base = OTHER; note = phosphorothioate internucleotide linkage
tatatcagaaacagaatcaggtgtca

SEQ ID NO: 1031 - RNA, 26 nt, synthetic construct
  source 1..26: mol_type = other RNA
  modified_base 1: mod_base = OTHER; note = 2'-OMe modified nucleotide
  modified_base 3: mod_base = OTHER; note = 2'-OMe modified nucleotide
  modified_base 5: mod_base = OTHER; note = 2'-OMe modified nucleotide
  modified_base 7: mod_base = OTHER; note = 2'-OMe modified nucleotide
  modified_base 9: mod_base = OTHER; note = 2'-OMe modified nucleotide
  modified_base 11: mod_base = OTHER; note = 2'-OMe modified nucleotide
  modified_base 13: mod_base = OTHER; note = 2'-OMe modified nucleotide
  modified_base 17..26: mod_base = OTHER; note = 2'-OMe modified nucleotide
  modified_base 6: mod_base = OTHER; note = 2-deoxy-2-fluoro ribonucleotide
  modified_base 8: mod_base = OTHER; note = 2-deoxy-2-fluoro ribonucleotide
  modified_base 10: mod_base = OTHER; note = 2-deoxy-2-fluoro ribonucleotide
  modified_base 12: mod_base = OTHER; note = 2-deoxy-2-fluoro ribonucleotide
  modified_base 14..16: mod_base = OTHER; note = 2-deoxy-2-fluoro ribonucleotide
  modified_base 5..6: mod_base = OTHER; note = phosphorothioate internucleotide linkage
  modified_base 6..7: mod_base = OTHER; note = phosphorothioate internucleotide linkage
tatatcagaaacagaatcaggtgtca

SEQ ID NO: 1032 - RNA, 26 nt, synthetic construct
  source 1..26: mol_type = other RNA
  modified_base 1: mod_base = OTHER; note = 2'-OMe modified nucleotide
  modified_base 3: mod_base = OTHER; note = 2'-OMe modified nucleotide
  modified_base 5: mod_base = OTHER; note = 2'-OMe modified nucleotide
  modified_base 7: mod_base = OTHER; note = 2'-OMe modified nucleotide
  modified_base 9: mod_base = OTHER; note = 2'-OMe modified nucleotide
  modified_base 11: mod_base = OTHER; note = 2'-OMe modified nucleotide
  modified_base 13: mod_base = OTHER; note = 2'-OMe modified nucleotide
  modified_base 17: mod_base = OTHER; note = 2'-OMe modified nucleotide
  modified_base 19..23: mod_base = OTHER; note = 2'-OMe modified nucleotide
  modified_base 25..26: mod_base = OTHER; note = 2'-OMe modified nucleotide
  modified_base 6: mod_base = OTHER; note = 2-deoxy-2-fluoro ribonucleotide
  modified_base 8: mod_base = OTHER; note = 2-deoxy-2-fluoro ribonucleotide
  modified_base 10: mod_base = OTHER; note = 2-deoxy-2-fluoro ribonucleotide
  modified_base 12: mod_base = OTHER; note = 2-deoxy-2-fluoro ribonucleotide
  modified_base 14..16: mod_base = OTHER; note = 2-deoxy-2-fluoro ribonucleotide
  modified_base 18: mod_base = OTHER; note = 2-deoxy-2-fluoro ribonucleotide
  modified_base 24: mod_base = OTHER; note = 2-deoxy-2-fluoro ribonucleotide
  modified_base 5..6: mod_base = OTHER; note = phosphorothioate internucleotide linkage
  modified_base 6..7: mod_base = OTHER; note = phosphorothioate internucleotide linkage
tatatcagaaacagaatcaggtgtca

SEQ ID NO: 1033 - RNA, 26 nt, synthetic construct
  source 1..26: mol_type = other RNA
  modified_base 1: mod_base = OTHER; note = 2'-OMe modified nucleotide
  modified_base 3: mod_base = OTHER; note = 2'-OMe modified nucleotide
  modified_base 5: mod_base = OTHER; note = 2'-OMe modified nucleotide
  modified_base 7: mod_base = OTHER; note = 2'-OMe modified nucleotide
  modified_base 9: mod_base = OTHER; note = 2'-OMe modified nucleotide
  modified_base 11: mod_base = OTHER; note = 2'-OMe modified nucleotide
  modified_base 13: mod_base = OTHER; note = 2'-OMe modified nucleotide
  modified_base 17: mod_base = OTHER; note = 2'-OMe modified nucleotide
  modified_base 19..26: mod_base = OTHER; note = 2'-OMe modified nucleotide
  modified_base 6: mod_base = OTHER; note = 2-deoxy-2-fluoro ribonucleotide
  modified_base 8: mod_base = OTHER; note = 2-deoxy-2-fluoro ribonucleotide
  modified_base 10: mod_base = OTHER; note = 2-deoxy-2-fluoro ribonucleotide
  modified_base 12: mod_base = OTHER; note = 2-deoxy-2-fluoro ribonucleotide
  modified_base 14..16: mod_base = OTHER; note = 2-deoxy-2-fluoro ribonucleotide
  modified_base 18: mod_base = OTHER; note = 2-deoxy-2-fluoro ribonucleotide
  modified_base 5..6: mod_base = OTHER; note = phosphorothioate internucleotide linkage
  modified_base 6..7: mod_base = OTHER; note = phosphorothioate internucleotide linkage
tatatcagaaacagaatcaggtgtca

SEQ ID NO: 1034 - RNA, 26 nt, synthetic construct
  source 1..26: mol_type = other RNA
  modified_base 1: mod_base = OTHER; note = 2'-OMe modified nucleotide
  modified_base 3: mod_base = OTHER; note = 2'-OMe modified nucleotide
  modified_base 5: mod_base = OTHER; note = 2'-OMe modified nucleotide
  modified_base 7..11: mod_base = OTHER; note = 2'-OMe modified nucleotide
  modified_base 13: mod_base = OTHER; note = 2'-OMe modified nucleotide
  modified_base 17: mod_base = OTHER; note = 2'-OMe modified nucleotide
  modified_base 19..23: mod_base = OTHER; note = 2'-OMe modified nucleotide
  modified_base 25..26: mod_base = OTHER; note = 2'-OMe modified nucleotide
  modified_base 6: mod_base = OTHER; note = 2-deoxy-2-fluoro ribonucleotide
  modified_base 12: mod_base = OTHER; note = 2-deoxy-2-fluoro ribonucleotide
  modified_base 14..16: mod_base = OTHER; note = 2-deoxy-2-fluoro ribonucleotide
  modified_base 18: mod_base = OTHER; note = 2-deoxy-2-fluoro ribonucleotide
  modified_base 24: mod_base = OTHER; note = 2-deoxy-2-fluoro ribonucleotide
  modified_base 5..6: mod_base = OTHER; note = phosphorothioate internucleotide linkage
  modified_base 6..7: mod_base = OTHER; note = phosphorothioate internucleotide linkage
tatatcagaaacagaatcaggtgtca

SEQ ID NO: 1035 - RNA, 26 nt, synthetic construct
  source 1..26: mol_type = other RNA
  modified_base 1: mod_base = OTHER; note = 2'-OMe modified nucleotide
  modified_base 3: mod_base = OTHER; note = 2'-OMe modified nucleotide
  modified_base 5: mod_base = OTHER; note = 2'-OMe modified nucleotide
  modified_base 7: mod_base = OTHER; note = 2'-OMe modified nucleotide
  modified_base 9: mod_base = OTHER; note = 2'-OMe modified nucleotide
  modified_base 11: mod_base = OTHER; note = 2'-OMe modified nucleotide
  modified_base 13: mod_base = OTHER; note = 2'-OMe modified nucleotide
  modified_base 15: mod_base = OTHER; note = 2'-OMe modified nucleotide
  modified_base 17: mod_base = OTHER; note = 2'-OMe modified nucleotide
  modified_base 19: mod_base = OTHER; note = 2'-OMe modified nucleotide
  modified_base 21..25: mod_base = OTHER; note = 2'-OMe modified nucleotide
  modified_base 6: mod_base = OTHER; note = 2-deoxy-2-fluoro ribonucleotide
  modified_base 8: mod_base = OTHER; note = 2-deoxy-2-fluoro ribonucleotide
  modified_base 10: mod_base = OTHER; note = 2-deoxy-2-fluoro ribonucleotide
  modified_base 12: mod_base = OTHER; note = 2-deoxy-2-fluoro ribonucleotide
  modified_base 14: mod_base = OTHER; note = 2-deoxy-2-fluoro ribonucleotide
  modified_base 16: mod_base = OTHER; note = 2-deoxy-2-fluoro ribonucleotide
  modified_base 18: mod_base = OTHER; note = 2-deoxy-2-fluoro ribonucleotide
  modified_base 20: mod_base = OTHER; note = 2-deoxy-2-fluoro ribonucleotide
  modified_base 26: mod_base = OTHER; note = 2-deoxy-2-fluoro ribonucleotide
  modified_base 5..6: mod_base = OTHER; note = phosphorothioate internucleotide linkage
  modified_base 6..7: mod_base = OTHER; note = phosphorothioate internucleotide linkage
tatatcagaaacagaatcaggtgtca

SEQ ID NO: 1036 - RNA, 26 nt, synthetic construct
  source 1..26: mol_type = other RNA
  modified_base 25..26: mod_base = OTHER; note = 2'-methoxyethyl nucleotide
  modified_base 1: mod_base = OTHER; note = 2'-OMe modified nucleotide
  modified_base 3: mod_base = OTHER; note = 2'-OMe modified nucleotide
  modified_base 5: mod_base = OTHER; note = 2'-OMe modified nucleotide
  modified_base 7: mod_base = OTHER; note = 2'-OMe modified nucleotide
  modified_base 9: mod_base = OTHER; note = 2'-OMe modified nucleotide
  modified_base 11: mod_base = OTHER; note = 2'-OMe modified nucleotide
  modified_base 13: mod_base = OTHER; note = 2'-OMe modified nucleotide
  modified_base 17: mod_base = OTHER; note = 2'-OMe modified nucleotide
  modified_base 19: mod_base = OTHER; note = 2'-OMe modified nucleotide
  modified_base 21: mod_base = OTHER; note = 2'-OMe modified nucleotide
  modified_base 23: mod_base = OTHER; note = 2'-OMe modified nucleotide
  modified_base 6: mod_base = OTHER; note = 2-deoxy-2-fluoro ribonucleotide
  modified_base 8: mod_base = OTHER; note = 2-deoxy-2-fluoro ribonucleotide
  modified_base 10: mod_base = OTHER; note = 2-deoxy-2-fluoro ribonucleotide
  modified_base 12: mod_base = OTHER; note = 2-deoxy-2-fluoro ribonucleotide
  modified_base 14..16: mod_base = OTHER; note = 2-deoxy-2-fluoro ribonucleotide
  modified_base 18: mod_base = OTHER; note = 2-deoxy-2-fluoro ribonucleotide
  modified_base 20: mod_base = OTHER; note = 2-deoxy-2-fluoro ribonucleotide
  modified_base 22: mod_base = OTHER; note = 2-deoxy-2-fluoro ribonucleotide
  modified_base 24: mod_base = OTHER; note = 2-deoxy-2-fluoro ribonucleotide
  modified_base 5..6: mod_base = OTHER; note = phosphorothioate internucleotide linkage
  modified_base 6..7: mod_base = OTHER; note = phosphorothioate internucleotide linkage
tatatagttatcgaggctcattctca

SEQ ID NO: 1037 - RNA, 26 nt, synthetic construct
  source 1..26: mol_type = other RNA
  modified_base 5: mod_base = OTHER; note = 2',3'-seco nucleotide
  modified_base 1: mod_base = OTHER; note = 2'-OMe modified nucleotide
  modified_base 3: mod_base = OTHER; note = 2'-OMe modified nucleotide
  modified_base 7: mod_base = OTHER; note = 2'-OMe modified nucleotide
  modified_base 9: mod_base = OTHER; note = 2'-OMe modified nucleotide
  modified_base 11: mod_base = OTHER; note = 2'-OMe modified nucleotide
  modified_base 13: mod_base = OTHER; note = 2'-OMe modified nucleotide
  modified_base 17: mod_base = OTHER; note = 2'-OMe modified nucleotide
  modified_base 19: mod_base = OTHER; note = 2'-OMe modified nucleotide
  modified_base 21: mod_base = OTHER; note = 2'-OMe modified nucleotide
  modified_base 23: mod_base = OTHER; note = 2'-OMe modified nucleotide
  modified_base 25: mod_base = OTHER; note = 2'-OMe modified nucleotide
  modified_base 6: mod_base = OTHER; note = 2-deoxy-2-fluoro ribonucleotide
  modified_base 8: mod_base = OTHER; note = 2-deoxy-2-fluoro ribonucleotide
  modified_base 10: mod_base = OTHER; note = 2-deoxy-2-fluoro ribonucleotide
  modified_base 12: mod_base = OTHER; note = 2-deoxy-2-fluoro ribonucleotide
  modified_base 14..16: mod_base = OTHER; note = 2-deoxy-2-fluoro ribonucleotide
  modified_base 18: mod_base = OTHER; note = 2-deoxy-2-fluoro ribonucleotide
  modified_base 20: mod_base = OTHER; note = 2-deoxy-2-fluoro ribonucleotide
  modified_base 22: mod_base = OTHER; note = 2-deoxy-2-fluoro ribonucleotide
  modified_base 24: mod_base = OTHER; note = 2-deoxy-2-fluoro ribonucleotide
  modified_base 26: mod_base = OTHER; note = 2-deoxy-2-fluoro ribonucleotide
  modified_base 6..7: mod_base = OTHER; note = phosphorothioate internucleotide linkage
  modified_base 7..8: mod_base = OTHER; note = phosphorothioate internucleotide linkage
tatatagttatcgaggctcattctca

SEQ ID NO: 1038 - RNA, 26 nt, synthetic construct
  source 1..26: mol_type = other RNA
  modified_base 1: mod_base = OTHER; note = 2'-OMe modified nucleotide
  modified_base 3: mod_base = OTHER; note = 2'-OMe modified nucleotide
  modified_base 5: mod_base = OTHER; note = 2'-OMe modified nucleotide
  modified_base 7: mod_base = OTHER; note = 2'-OMe modified nucleotide
  modified_base 9: mod_base = OTHER; note = 2'-OMe modified nucleotide
  modified_base 11: mod_base = OTHER; note = 2'-OMe modified nucleotide
  modified_base 13: mod_base = OTHER; note = 2'-OMe modified nucleotide
  modified_base 17: mod_base = OTHER; note = 2'-OMe modified nucleotide
  modified_base 19: mod_base = OTHER; note = 2'-OMe modified nucleotide
  modified_base 21: mod_base = OTHER; note = 2'-OMe modified nucleotide
  modified_base 23: mod_base = OTHER; note = 2'-OMe modified nucleotide
  modified_base 25: mod_base = OTHER; note = 2'-OMe modified nucleotide
  modified_base 6: mod_base = OTHER; note = 2-deoxy-2-fluoro ribonucleotide
  modified_base 8: mod_base = OTHER; note = 2-deoxy-2-fluoro ribonucleotide
  modified_base 10: mod_base = OTHER; note = 2-deoxy-2-fluoro ribonucleotide
  modified_base 12: mod_base = OTHER; note = 2-deoxy-2-fluoro ribonucleotide
  modified_base 14..16: mod_base = OTHER; note = 2-deoxy-2-fluoro ribonucleotide
  modified_base 18: mod_base = OTHER; note = 2-deoxy-2-fluoro ribonucleotide
  modified_base 20: mod_base = OTHER; note = 2-deoxy-2-fluoro ribonucleotide
  modified_base 22: mod_base = OTHER; note = 2-deoxy-2-fluoro ribonucleotide
  modified_base 24: mod_base = OTHER; note = 2-deoxy-2-fluoro ribonucleotide
  modified_base 26: mod_base = OTHER; note = 2-deoxy-2-fluoro ribonucleotide
  modified_base 6..7: mod_base = OTHER; note = phosphorothioate internucleotide linkage
  modified_base 7..8: mod_base = OTHER; note = phosphorothioate internucleotide linkage
tatatagttatcgaggctcattctca

SEQ ID NO: 1039 - RNA, 26 nt, synthetic construct
  source 1..26: mol_type = other RNA
  modified_base 1: mod_base = OTHER; note = 2'-OMe modified nucleotide
  modified_base 3: mod_base = OTHER; note = 2'-OMe modified nucleotide
  modified_base 5: mod_base = OTHER; note = 2'-OMe modified nucleotide
  modified_base 7: mod_base = OTHER; note = 2'-OMe modified nucleotide
  modified_base 9: mod_base = OTHER; note = 2'-OMe modified nucleotide
  modified_base 11: mod_base = OTHER; note = 2'-OMe modified nucleotide
  modified_base 13: mod_base = OTHER; note = 2'-OMe modified nucleotide
  modified_base 17: mod_base = OTHER; note = 2'-OMe modified nucleotide
  modified_base 19: mod_base = OTHER; note = 2'-OMe modified nucleotide
  modified_base 21: mod_base = OTHER; note = 2'-OMe modified nucleotide
  modified_base 23: mod_base = OTHER; note = 2'-OMe modified nucleotide
  modified_base 25..26: mod_base = OTHER; note = 2'-OMe modified nucleotide
  modified_base 6: mod_base = OTHER; note = 2-deoxy-2-fluoro ribonucleotide
  modified_base 8: mod_base = OTHER; note = 2-deoxy-2-fluoro ribonucleotide
  modified_base 10: mod_base = OTHER; note = 2-deoxy-2-fluoro ribonucleotide
  modified_base 12: mod_base = OTHER; note = 2-deoxy-2-fluoro ribonucleotide
  modified_base 14..16: mod_base = OTHER; note = 2-deoxy-2-fluoro ribonucleotide
  modified_base 18: mod_base = OTHER; note = 2-deoxy-2-fluoro ribonucleotide
  modified_base 20: mod_base = OTHER; note = 2-deoxy-2-fluoro ribonucleotide
  modified_base 22: mod_base = OTHER; note = 2-deoxy-2-fluoro ribonucleotide
  modified_base 24: mod_base = OTHER; note = 2-deoxy-2-fluoro ribonucleotide
  modified_base 5..6: mod_base = OTHER; note = phosphorothioate internucleotide linkage
  modified_base 6..7: mod_base = OTHER; note = phosphorothioate internucleotide linkage
tatatcagccccttattgttatacga

SEQ ID NO: 1040 - RNA, 26 nt, synthetic construct
  source 1..26: mol_type = other RNA
  modified_base 1: mod_base = OTHER; note = 2'-OMe modified nucleotide
  modified_base 3: mod_base = OTHER; note = 2'-OMe modified nucleotide
  modified_base 5..7: mod_base = OTHER; note = 2'-OMe modified nucleotide
  modified_base 9: mod_base = OTHER; note = 2'-OMe modified nucleotide
  modified_base 11: mod_base = OTHER; note = 2'-OMe modified nucleotide
  modified_base 13: mod_base = OTHER; note = 2'-OMe modified nucleotide
  modified_base 17: mod_base = OTHER; note = 2'-OMe modified nucleotide
  modified_base 19: mod_base = OTHER; note = 2'-OMe modified nucleotide
  modified_base 21: mod_base = OTHER; note = 2'-OMe modified nucleotide
  modified_base 23: mod_base = OTHER; note = 2'-OMe modified nucleotide
  modified_base 25: mod_base = OTHER; note = 2'-OMe modified nucleotide
  modified_base 8: mod_base = OTHER; note = 2-deoxy-2-fluoro ribonucleotide
  modified_base 10: mod_base = OTHER; note = 2-deoxy-2-fluoro ribonucleotide
  modified_base 12: mod_base = OTHER; note = 2-deoxy-2-fluoro ribonucleotide
  modified_base 14..16: mod_base = OTHER; note = 2-deoxy-2-fluoro ribonucleotide
  modified_base 18: mod_base = OTHER; note = 2-deoxy-2-fluoro ribonucleotide
  modified_base 20: mod_base = OTHER; note = 2-deoxy-2-fluoro ribonucleotide
  modified_base 22: mod_base = OTHER; note = 2-deoxy-2-fluoro ribonucleotide
  modified_base 24: mod_base = OTHER; note = 2-deoxy-2-fluoro ribonucleotide
  modified_base 26: mod_base = OTHER; note = 2-deoxy-2-fluoro ribonucleotide
  modified_base 5..6: mod_base = OTHER; note = phosphorothioate internucleotide linkage
  modified_base 6..7: mod_base = OTHER; note = phosphorothioate internucleotide linkage
tatatcagccccttattgttatacga

SEQ ID NO: 1041 - RNA, 26 nt, synthetic construct
  source 1..26: mol_type = other RNA
  modified_base 1: mod_base = OTHER; note = 2'-OMe modified nucleotide
  modified_base 3: mod_base = OTHER; note = 2'-OMe modified nucleotide
  modified_base 5..7: mod_base = OTHER; note = 2'-OMe modified nucleotide
  modified_base 9: mod_base = OTHER; note = 2'-OMe modified nucleotide
  modified_base 11: mod_base = OTHER; note = 2'-OMe modified nucleotide
  modified_base 13: mod_base = OTHER; note = 2'-OMe modified nucleotide
  modified_base 17: mod_base = OTHER; note = 2'-OMe modified nucleotide
  modified_base 19: mod_base = OTHER; note = 2'-OMe modified nucleotide
  modified_base 21: mod_base = OTHER; note = 2'-OMe modified nucleotide
  modified_base 23: mod_base = OTHER; note = 2'-OMe modified nucleotide
  modified_base 25..26: mod_base = OTHER; note = 2'-OMe modified nucleotide
  modified_base 8: mod_base = OTHER; note = 2-deoxy-2-fluoro ribonucleotide
  modified_base 10: mod_base = OTHER; note = 2-deoxy-2-fluoro ribonucleotide
  modified_base 12: mod_base = OTHER; note = 2-deoxy-2-fluoro ribonucleotide
  modified_base 14..16: mod_base = OTHER; note = 2-deoxy-2-fluoro ribonucleotide
  modified_base 18: mod_base = OTHER; note = 2-deoxy-2-fluoro ribonucleotide
  modified_base 20: mod_base = OTHER; note = 2-deoxy-2-fluoro ribonucleotide
  modified_base 22: mod_base = OTHER; note = 2-deoxy-2-fluoro ribonucleotide
  modified_base 24: mod_base = OTHER; note = 2-deoxy-2-fluoro ribonucleotide
  modified_base 5..6: mod_base = OTHER; note = phosphorothioate internucleotide linkage
  modified_base 6..7: mod_base = OTHER; note = phosphorothioate internucleotide linkage
tatatcagccccttattgttatacga

SEQ ID NO: 1042 - RNA, 26 nt, synthetic construct
  source 1..26: mol_type = other RNA
  modified_base 1: mod_base = OTHER; note = 2'-OMe modified nucleotide
  modified_base 3: mod_base = OTHER; note = 2'-OMe modified nucleotide
  modified_base 5: mod_base = OTHER; note = 2'-OMe modified nucleotide
  modified_base 7: mod_base = OTHER; note = 2'-OMe modified nucleotide
  modified_base 9: mod_base = OTHER; note = 2'-OMe modified nucleotide
  modified_base 11: mod_base = OTHER; note = 2'-OMe modified nucleotide
  modified_base 13: mod_base = OTHER; note = 2'-OMe modified nucleotide
  modified_base 17: mod_base = OTHER; note = 2'-OMe modified nucleotide
  modified_base 19: mod_base = OTHER; note = 2'-OMe modified nucleotide
  modified_base 21: mod_base = OTHER; note = 2'-OMe modified nucleotide
  modified_base 23: mod_base = OTHER; note = 2'-OMe modified nucleotide
  modified_base 25: mod_base = OTHER; note = 2'-OMe modified nucleotide
  modified_base 6: mod_base = OTHER; note = 2-deoxy-2-fluoro ribonucleotide
  modified_base 8: mod_base = OTHER; note = 2-deoxy-2-fluoro ribonucleotide
  modified_base 10: mod_base = OTHER; note = 2-deoxy-2-fluoro ribonucleotide
  modified_base 12: mod_base = OTHER; note = 2-deoxy-2-fluoro ribonucleotide
  modified_base 14..16: mod_base = OTHER; note = 2-deoxy-2-fluoro ribonucleotide
  modified_base 18: mod_base = OTHER; note = 2-deoxy-2-fluoro ribonucleotide
  modified_base 20: mod_base = OTHER; note = 2-deoxy-2-fluoro ribonucleotide
  modified_base 22: mod_base = OTHER; note = 2-deoxy-2-fluoro ribonucleotide
  modified_base 24: mod_base = OTHER; note = 2-deoxy-2-fluoro ribonucleotide
  modified_base 26: mod_base = OTHER; note = 2-deoxy-2-fluoro ribonucleotide
  modified_base 5..6: mod_base = OTHER; note = phosphorothioate internucleotide linkage
  modified_base 6..7: mod_base = OTHER; note = phosphorothioate internucleotide linkage
tatatagttatcgaggctcattctca

SEQ ID NO: 1043 - RNA, 26 nt, synthetic construct
  source 1..26: mol_type = other RNA
  modified_base 1: mod_base = OTHER; note = 2'-OMe modified nucleotide
  modified_base 3: mod_base = OTHER; note = 2'-OMe modified nucleotide
  modified_base 5: mod_base = OTHER; note = 2'-OMe modified nucleotide
  modified_base 7: mod_base = OTHER; note = 2'-OMe modified nucleotide
  modified_base 9: mod_base = OTHER; note = 2'-OMe modified nucleotide
  modified_base 11: mod_base = OTHER; note = 2'-OMe modified nucleotide
  modified_base 13: mod_base = OTHER; note = 2'-OMe modified nucleotide
  modified_base 17: mod_base = OTHER; note = 2'-OMe modified nucleotide
  modified_base 19..26: mod_base = OTHER; note = 2'-OMe modified nucleotide
  modified_base 6: mod_base = OTHER; note = 2-deoxy-2-fluoro ribonucleotide
  modified_base 8: mod_base = OTHER; note = 2-deoxy-2-fluoro ribonucleotide
  modified_base 10: mod_base = OTHER; note = 2-deoxy-2-fluoro ribonucleotide
  modified_base 12: mod_base = OTHER; note = 2-deoxy-2-fluoro ribonucleotide
  modified_base 14..16: mod_base = OTHER; note = 2-deoxy-2-fluoro ribonucleotide
  modified_base 18: mod_base = OTHER; note = 2-deoxy-2-fluoro ribonucleotide
  modified_base 5..6: mod_base = OTHER; note = phosphorothioate internucleotide linkage
  modified_base 6..7: mod_base = OTHER; note = phosphorothioate internucleotide linkage
tatatagttatcgaggctcattctca

SEQ ID NO: 1044 - RNA, 26 nt, synthetic construct
  source 1..26: mol_type = other RNA
  modified_base 1: mod_base = OTHER; note = 2'-OMe modified nucleotide
  modified_base 3: mod_base = OTHER; note = 2'-OMe modified nucleotide
  modified_base 5: mod_base = OTHER; note = 2'-OMe modified nucleotide
  modified_base 7: mod_base = OTHER; note = 2'-OMe modified nucleotide
  modified_base 9: mod_base = OTHER; note = 2'-OMe modified nucleotide
  modified_base 11: mod_base = OTHER; note = 2'-OMe modified nucleotide
  modified_base 13: mod_base = OTHER; note = 2'-OMe modified nucleotide
  modified_base 17..26: mod_base = OTHER; note = 2'-OMe modified nucleotide
  modified_base 6: mod_base = OTHER; note = 2-deoxy-2-fluoro ribonucleotide
  modified_base 8: mod_base = OTHER; note = 2-deoxy-2-fluoro ribonucleotide
  modified_base 10: mod_base = OTHER; note = 2-deoxy-2-fluoro ribonucleotide
  modified_base 12: mod_base = OTHER; note = 2-deoxy-2-fluoro ribonucleotide
  modified_base 14..16: mod_base = OTHER; note = 2-deoxy-2-fluoro ribonucleotide
  modified_base 5..6: mod_base = OTHER; note = phosphorothioate internucleotide linkage
  modified_base 6..7: mod_base = OTHER; note = phosphorothioate internucleotide linkage
tatatagttatcgaggctcattctca

SEQ ID NO: 1045 - RNA, 26 nt, synthetic construct
  source 1..26: mol_type = other RNA
  modified_base 1: mod_base = OTHER; note = 2'-OMe modified nucleotide
  modified_base 3: mod_base = OTHER; note = 2'-OMe modified nucleotide
  modified_base 5: mod_base = OTHER; note = 2'-OMe modified nucleotide
  modified_base 7..11: mod_base = OTHER; note = 2'-OMe modified nucleotide
  modified_base 13: mod_base = OTHER; note = 2'-OMe modified nucleotide
  modified_base 17: mod_base = OTHER; note = 2'-OMe modified nucleotide
  modified_base 19..26: mod_base = OTHER; note = 2'-OMe modified nucleotide
  modified_base 6: mod_base = OTHER; note = 2-deoxy-2-fluoro ribonucleotide
  modified_base 12: mod_base = OTHER; note = 2-deoxy-2-fluoro ribonucleotide
  modified_base 14..16: mod_base = OTHER; note = 2-deoxy-2-fluoro ribonucleotide
  modified_base 18: mod_base = OTHER; note = 2-deoxy-2-fluoro ribonucleotide
  modified_base 5..6: mod_base = OTHER; note = phosphorothioate internucleotide linkage
  modified_base 6..7: mod_base = OTHER; note = phosphorothioate internucleotide linkage
tatatagttatcgaggctcattctca

SEQ ID NO: 1046 - RNA, 26 nt, synthetic construct
  source 1..26: mol_type = other RNA
  modified_base 1: mod_base = OTHER; note = 2'-OMe modified nucleotide
  modified_base 3: mod_base = OTHER; note = 2'-OMe modified nucleotide
  modified_base 5: mod_base = OTHER; note = 2'-OMe modified nucleotide
  modified_base 7..11: mod_base = OTHER; note = 2'-OMe modified nucleotide
  modified_base 13: mod_base = OTHER; note = 2'-OMe modified nucleotide
  modified_base 17..26: mod_base = OTHER; note = 2'-OMe modified nucleotide
  modified_base 6: mod_base = OTHER; note = 2-deoxy-2-fluoro ribonucleotide
  modified_base 12: mod_base = OTHER; note = 2-deoxy-2-fluoro ribonucleotide
  modified_base 14..16: mod_base = OTHER; note = 2-deoxy-2-fluoro ribonucleotide
  modified_base 5..6: mod_base = OTHER; note = phosphorothioate internucleotide linkage
  modified_base 6..7: mod_base = OTHER; note = phosphorothioate internucleotide linkage
tatatagttatcgaggctcattctca

SEQ ID NO: 1047 - RNA, 26 nt, synthetic construct
  source 1..26: mol_type = other RNA
  modified_base 1: mod_base = OTHER; note = 2'-OMe modified nucleotide
  modified_base 3: mod_base = OTHER; note = 2'-OMe modified nucleotide
  modified_base 5..11: mod_base = OTHER; note = 2'-OMe modified nucleotide
  modified_base 13: mod_base = OTHER; note = 2'-OMe modified nucleotide
  modified_base 17..26: mod_base = OTHER; note = 2'-OMe modified nucleotide
  modified_base 12: mod_base = OTHER; note = 2-deoxy-2-fluoro ribonucleotide
  modified_base 14..16: mod_base = OTHER; note = 2-deoxy-2-fluoro ribonucleotide
  modified_base 5..6: mod_base = OTHER; note = phosphorothioate internucleotide linkage
  modified_base 6..7: mod_base = OTHER; note = phosphorothioate internucleotide linkage
tatatagttatcgaggctcattctca

SEQ ID NO: 1048 - RNA, 26 nt, synthetic construct
  source 1..26: mol_type = other RNA
  modified_base 1: mod_base = OTHER; note = 2'-OMe modified nucleotide
  modified_base 3: mod_base = OTHER; note = 2'-OMe modified nucleotide
  modified_base 5..13: mod_base = OTHER; note = 2'-OMe modified nucleotide
  modified_base 17..26: mod_base = OTHER; note = 2'-OMe modified nucleotide
  modified_base 14..16: mod_base = OTHER; note = 2-deoxy-2-fluoro ribonucleotide
  modified_base 5..6: mod_base = OTHER; note = phosphorothioate internucleotide linkage
  modified_base 6..7: mod_base = OTHER; note = phosphorothioate internucleotide linkage
tatatagttatcgaggctcattctca

SEQ ID NO: 1049 - RNA, 27 nt, synthetic construct
  source 1..27: mol_type = other RNA
  modified_base 1: mod_base = OTHER; note = 2'-OMe modified nucleotide
  modified_base 3: mod_base = OTHER; note = 2'-OMe modified nucleotide
  modified_base 5: mod_base = OTHER; note = 2'-OMe modified nucleotide
  modified_base 7: mod_base = OTHER; note = 2'-OMe modified nucleotide
  modified_base 9: mod_base = OTHER; note = 2'-OMe modified nucleotide
  modified_base 11: mod_base = OTHER; note = 2'-OMe modified nucleotide
  modified_base 13: mod_base = OTHER; note = 2'-OMe modified nucleotide
  modified_base 17: mod_base = OTHER; note = 2'-OMe modified nucleotide
  modified_base 19..26: mod_base = OTHER; note = 2'-OMe modified nucleotide
  modified_base 6: mod_base = OTHER; note = 2-deoxy-2-fluoro ribonucleotide
  modified_base 8: mod_base = OTHER; note = 2-deoxy-2-fluoro ribonucleotide
  modified_base 10: mod_base = OTHER; note = 2-deoxy-2-fluoro ribonucleotide
  modified_base 12: mod_base = OTHER; note = 2-deoxy-2-fluoro ribonucleotide
  modified_base 14..15: mod_base = OTHER; note = 2-deoxy-2-fluoro ribonucleotide
  modified_base 19: mod_base = OTHER; note = 2-deoxy-2-fluoro ribonucleotide
  modified_base 5..6: mod_base = OTHER; note = phosphorothioate internucleotide linkage
  modified_base 6..7: mod_base = OTHER; note = phosphorothioate internucleotide linkage
tatatagttatcgagdgctcattctca

SEQ ID NO: 1050 - RNA, 27 nt, synthetic construct
  source 1..27: mol_type = other RNA
  modified_base 1: mod_base = OTHER; note = 2'-OMe modified nucleotide
  modified_base 3: mod_base = OTHER; note = 2'-OMe modified nucleotide
  modified_base 5: mod_base = OTHER; note = 2'-OMe modified nucleotide
  modified_base 7: mod_base = OTHER; note = 2'-OMe modified nucleotide
  modified_base 9: mod_base = OTHER; note = 2'-OMe modified nucleotide
  modified_base 11: mod_base = OTHER; note = 2'-OMe modified nucleotide
  modified_base 13: mod_base = OTHER; note = 2'-OMe modified nucleotide
  modified_base 17..26: mod_base = OTHER; note = 2'-OMe modified nucleotide
  modified_base 6: mod_base = OTHER; note = 2-deoxy-2-fluoro ribonucleotide
  modified_base 8: mod_base = OTHER; note = 2-deoxy-2-fluoro ribonucleotide
  modified_base 10: mod_base = OTHER; note = 2-deoxy-2-fluoro ribonucleotide
  modified_base 12: mod_base = OTHER; note = 2-deoxy-2-fluoro ribonucleotide
  modified_base 14..15: mod_base = OTHER; note = 2-deoxy-2-fluoro ribonucleotide
  modified_base 5..6: mod_base = OTHER; note = phosphorothioate internucleotide linkage
  modified_base 6..7: mod_base = OTHER; note = phosphorothioate internucleotide linkage
tatatagttatcgagdgctcattctca

SEQ ID NO: 1051 - RNA, 27 nt, synthetic construct
  source 1..27: mol_type = other RNA
  modified_base 1: mod_base = OTHER; note = 2'-OMe modified nucleotide
  modified_base 3: mod_base = OTHER; note = 2'-OMe modified nucleotide
  modified_base 5: mod_base = OTHER; note = 2'-OMe modified nucleotide
  modified_base 7..11: mod_base = OTHER; note = 2'-OMe modified nucleotide
  modified_base 13: mod_base = OTHER; note = 2'-OMe modified nucleotide
  modified_base 17: mod_base = OTHER; note = 2'-OMe modified nucleotide
  modified_base 19..26: mod_base = OTHER; note = 2'-OMe modified nucleotide
  modified_base 6: mod_base = OTHER; note = 2-deoxy-2-fluoro ribonucleotide
  modified_base 12: mod_base = OTHER; note = 2-deoxy-2-fluoro ribonucleotide
  modified_base 14..15: mod_base = OTHER; note = 2-deoxy-2-fluoro ribonucleotide
  modified_base 19: mod_base = OTHER; note = 2-deoxy-2-fluoro ribonucleotide
  modified_base 5..6: mod_base = OTHER; note = phosphorothioate internucleotide linkage
  modified_base 6..7: mod_base = OTHER; note = phosphorothioate internucleotide linkage
tatatagttatcgagdgctcattctca

SEQ ID NO: 1052 - RNA, 27 nt, synthetic construct
  source 1..27: mol_type = other RNA
  modified_base 1: mod_base = OTHER; note = 2'-OMe modified nucleotide
  modified_base 3: mod_base = OTHER; note = 2'-OMe modified nucleotide
  modified_base 5: mod_base = OTHER; note = 2'-OMe modified nucleotide
  modified_base 7..11: mod_base = OTHER; note = 2'-OMe modified nucleotide
  modified_base 13: mod_base = OTHER; note = 2'-OMe modified nucleotide
  modified_base 17..26: mod_base = OTHER; note = 2'-OMe modified nucleotide
  modified_base 6: mod_base = OTHER; note = 2-deoxy-2-fluoro ribonucleotide
  modified_base 12: mod_base = OTHER; note = 2-deoxy-2-fluoro ribonucleotide
  modified_base 14..15: mod_base = OTHER; note = 2-deoxy-2-fluoro ribonucleotide
  modified_base 5..6: mod_base = OTHER; note = phosphorothioate internucleotide linkage
  modified_base 6..7: mod_base = OTHER; note = phosphorothioate internucleotide linkage
tatatagttatcgagdgctcattctca

SEQ ID NO: 1053 - RNA, 27 nt, synthetic construct
  source 1..27: mol_type = other RNA
  modified_base 1: mod_base = OTHER; note = 2'-OMe modified nucleotide
  modified_base 3: mod_base = OTHER; note = 2'-OMe modified nucleotide
  modified_base 5..11: mod_base = OTHER; note = 2'-OMe modified nucleotide
  modified_base 13: mod_base = OTHER; note = 2'-OMe modified nucleotide
  modified_base 17..26: mod_base = OTHER; note = 2'-OMe modified nucleotide
  modified_base 12: mod_base = OTHER; note = 2-deoxy-2-fluoro ribonucleotide
  modified_base 14..15: mod_base = OTHER; note = 2-deoxy-2-fluoro ribonucleotide
  modified_base 5..6: mod_base = OTHER; note = phosphorothioate internucleotide linkage
  modified_base 6..7: mod_base = OTHER; note = phosphorothioate internucleotide linkage
tatatagttatcgagdgctcattctca

SEQ ID NO: 1054 - RNA, 27 nt, synthetic construct
  source 1..27: mol_type = other RNA
  modified_base 1: mod_base = OTHER; note = 2'-OMe modified nucleotide
  modified_base 3: mod_base = OTHER; note = 2'-OMe modified nucleotide
  modified_base 5..13: mod_base = OTHER; note = 2'-OMe modified nucleotide
  modified_base 17..26: mod_base = OTHER; note = 2'-OMe modified nucleotide
  modified_base 14..15: mod_base = OTHER; note = 2-deoxy-2-fluoro ribonucleotide
  modified_base 5..6: mod_base = OTHER; note = phosphorothioate internucleotide linkage
  modified_base 6..7: mod_base = OTHER; note = phosphorothioate internucleotide linkage
tatatagttatcgagdgctcattctca

SEQ ID NO: 1055 - RNA, 26 nt, synthetic construct
  source 1..26: mol_type = other RNA
  modified_base 1: mod_base = OTHER; note = 2'-OMe modified nucleotide
  modified_base 3: mod_base = OTHER; note = 2'-OMe modified nucleotide
  modified_base 5: mod_base = OTHER; note = 2'-OMe modified nucleotide
  modified_base 7: mod_base = OTHER; note = 2'-OMe modified nucleotide
  modified_base 9: mod_base = OTHER; note = 2'-OMe modified nucleotide
  modified_base 11: mod_base = OTHER; note = 2'-OMe modified nucleotide
  modified_base 13..14: mod_base = OTHER; note = 2'-OMe modified nucleotide
  modified_base 17: mod_base = OTHER; note = 2'-OMe modified nucleotide
  modified_base 19..26: mod_base = OTHER; note = 2'-OMe modified nucleotide
  modified_base 6: mod_base = OTHER; note = 2-deoxy-2-fluoro ribonucleotide
  modified_base 8: mod_base = OTHER; note = 2-deoxy-2-fluoro ribonucleotide
  modified_base 10: mod_base = OTHER; note = 2-deoxy-2-fluoro ribonucleotide
  modified_base 12: mod_base = OTHER; note = 2-deoxy-2-fluoro ribonucleotide
  modified_base 15..16: mod_base = OTHER; note = 2-deoxy-2-fluoro ribonucleotide
  modified_base 18: mod_base = OTHER; note = 2-deoxy-2-fluoro ribonucleotide
  modified_base 5..6: mod_base = OTHER; note = phosphorothioate internucleotide linkage
  modified_base 6..7: mod_base = OTHER; note = phosphorothioate internucleotide linkage
tatatagttatcgaggctcattctca

SEQ ID NO: 1056 - RNA, 26 nt, synthetic construct
  source 1..26: mol_type = other RNA
  modified_base 1: mod_base = OTHER; note = 2'-OMe modified nucleotide
  modified_base 3: mod_base = OTHER; note = 2'-OMe modified nucleotide
  modified_base 5: mod_base = OTHER; note = 2'-OMe modified nucleotide
  modified_base 7: mod_base = OTHER; note = 2'-OMe modified nucleotide
  modified_base 9: mod_base = OTHER; note = 2'-OMe modified nucleotide
  modified_base 11: mod_base = OTHER; note = 2'-OMe modified nucleotide
  modified_base 13..14: mod_base = OTHER; note = 2'-OMe modified nucleotide
  modified_base 17..26: mod_base = OTHER; note = 2'-OMe modified nucleotide
  modified_base 6: mod_base = OTHER; note = 2-deoxy-2-fluoro ribonucleotide
  modified_base 8: mod_base = OTHER; note = 2-deoxy-2-fluoro ribonucleotide
  modified_base 10: mod_base = OTHER; note = 2-deoxy-2-fluoro ribonucleotide
  modified_base 12: mod_base = OTHER; note = 2-deoxy-2-fluoro ribonucleotide
  modified_base 15..16: mod_base = OTHER; note = 2-deoxy-2-fluoro ribonucleotide
  modified_base 5..6: mod_base = OTHER; note = phosphorothioate internucleotide linkage
  modified_base 6..7: mod_base = OTHER; note = phosphorothioate internucleotide linkage
tatatagttatcgaggctcattctca

SEQ ID NO: 1057 - RNA, 26 nt, synthetic construct
  source 1..26: mol_type = other RNA
  modified_base 1: mod_base = OTHER; note = 2'-OMe modified nucleotide
  modified_base 3: mod_base = OTHER; note = 2'-OMe modified nucleotide
  modified_base 5: mod_base = OTHER; note = 2'-OMe modified nucleotide
  modified_base 7..11: mod_base = OTHER; note = 2'-OMe modified nucleotide
  modified_base 13..14: mod_base = OTHER; note = 2'-OMe modified nucleotide
  modified_base 17: mod_base = OTHER; note = 2'-OMe modified nucleotide
  modified_base 19..26: mod_base = OTHER; note = 2'-OMe modified nucleotide
  modified_base 6: mod_base = OTHER; note = 2-deoxy-2-fluoro ribonucleotide
  modified_base 12: mod_base = OTHER; note = 2-deoxy-2-fluoro ribonucleotide
  modified_base 15..16: mod_base = OTHER; note = 2-deoxy-2-fluoro ribonucleotide
  modified_base 18: mod_base = OTHER; note = 2-deoxy-2-fluoro ribonucleotide
  modified_base 5..6: mod_base = OTHER; note = phosphorothioate internucleotide linkage
  modified_base 6..7: mod_base = OTHER; note = phosphorothioate internucleotide linkage
tatatagttatcgaggctcattctca

SEQ ID NO: 1058 - RNA, 26 nt, synthetic construct
  source 1..26: mol_type = other RNA
  modified_base 1: mod_base = OTHER; note = 2'-OMe modified nucleotide
  modified_base 3: mod_base = OTHER; note = 2'-OMe modified nucleotide
  modified_base 5: mod_base = OTHER; note = 2'-OMe modified nucleotide
  modified_base 7..11: mod_base = OTHER; note = 2'-OMe modified nucleotide
  modified_base 13..14: mod_base = OTHER; note = 2'-OMe modified nucleotide
  modified_base 17..26: mod_base = OTHER; note = 2'-OMe modified nucleotide
  modified_base 6: mod_base = OTHER; note = 2-deoxy-2-fluoro ribonucleotide
  modified_base 12: mod_base = OTHER; note = 2-deoxy-2-fluoro ribonucleotide
  modified_base 15..16: mod_base = OTHER; note = 2-deoxy-2-fluoro ribonucleotide
  modified_base 5..6: mod_base = OTHER; note = phosphorothioate internucleotide linkage
  modified_base 6..7: mod_base = OTHER; note = phosphorothioate internucleotide linkage
tatatagttatcgaggctcattctca

SEQ ID NO: 1059 - RNA, 26 nt, synthetic construct
  source 1..26: mol_type = other RNA
  modified_base 1: mod_base = OTHER; note = 2'-OMe modified nucleotide
  modified_base 3: mod_base = OTHER; note = 2'-OMe modified nucleotide
  modified_base 5..11: mod_base = OTHER; note = 2'-OMe modified nucleotide
  modified_base 13..14: mod_base = OTHER; note = 2'-OMe modified nucleotide
  modified_base 17..26: mod_base = OTHER; note = 2'-OMe modified nucleotide
  modified_base 12: mod_base = OTHER; note = 2-deoxy-2-fluoro ribonucleotide
  modified_base 15..16: mod_base = OTHER; note = 2-deoxy-2-fluoro ribonucleotide
  modified_base 5..6: mod_base = OTHER; note = phosphorothioate internucleotide linkage
  modified_base 6..7: mod_base = OTHER; note = phosphorothioate internucleotide linkage
tatatagttatcgaggctcattctca

SEQ ID NO: 1060 - RNA, 26 nt, synthetic construct
  source 1..26: mol_type = other RNA
  modified_base 1: mod_base = OTHER; note = 2'-OMe modified nucleotide
  modified_base 3: mod_base = OTHER; note = 2'-OMe modified nucleotide
  modified_base 5..14: mod_base = OTHER; note = 2'-OMe modified nucleotide
  modified_base 17..26: mod_base = OTHER; note = 2'-OMe modified nucleotide
  modified_base 15..16: mod_base = OTHER; note = 2-deoxy-2-fluoro ribonucleotide
  modified_base 5..6: mod_base = OTHER; note = phosphorothioate internucleotide linkage
  modified_base 6..7: mod_base = OTHER; note = phosphorothioate internucleotide linkage
tatatagttatcgaggctcattctca

SEQ ID NO: 1061 - RNA, 26 nt, synthetic construct
  source 1..26: mol_type = other RNA
  modified_base 1: mod_base = OTHER; note = 2'-OMe modified nucleotide
  modified_base 3: mod_base = OTHER; note = 2'-OMe modified nucleotide
  modified_base 5: mod_base = OTHER; note = 2'-OMe modified nucleotide
  modified_base 7: mod_base = OTHER; note = 2'-OMe modified nucleotide
  modified_base 9: mod_base = OTHER; note = 2'-OMe modified nucleotide
  modified_base 11: mod_base = OTHER; note = 2'-OMe modified nucleotide
  modified_base 13: mod_base = OTHER; note = 2'-OMe modified nucleotide
  modified_base 17: mod_base = OTHER; note = 2'-OMe modified nucleotide
  modified_base 19..26: mod_base = OTHER; note = 2'-OMe modified nucleotide
  modified_base 6: mod_base = OTHER; note = 2-deoxy-2-fluoro ribonucleotide
  modified_base 8: mod_base = OTHER; note = 2-deoxy-2-fluoro ribonucleotide
  modified_base 10: mod_base = OTHER; note = 2-deoxy-2-fluoro ribonucleotide
  modified_base 12: mod_base = OTHER; note = 2-deoxy-2-fluoro ribonucleotide
  modified_base 14..16: mod_base = OTHER; note = 2-deoxy-2-fluoro ribonucleotide
  modified_base 18: mod_base = OTHER; note = 2-deoxy-2-fluoro ribonucleotide
  modified_base 5..6: mod_base = OTHER; note = phosphorothioate internucleotide linkage
  modified_base 6..7: mod_base = OTHER; note = phosphorothioate internucleotide linkage
tatatagttatcgaggctcattctca

SEQ ID NO: 1062 - RNA, 26 nt, synthetic construct
  source 1..26: mol_type = other RNA
  modified_base 1: mod_base = OTHER; note = 2'-OMe modified nucleotide
  modified_base 3: mod_base = OTHER; note = 2'-OMe modified nucleotide
  modified_base 5: mod_base = OTHER; note = 2'-OMe modified nucleotide
  modified_base 7..11: mod_base = OTHER; note = 2'-OMe modified nucleotide
  modified_base 13: mod_base = OTHER; note = 2'-OMe modified nucleotide
  modified_base 17: mod_base = OTHER; note = 2'-OMe modified nucleotide
  modified_base 19..26: mod_base = OTHER; note = 2'-OMe modified nucleotide
  modified_base 6: mod_base = OTHER; note = 2-deoxy-2-fluoro ribonucleotide
  modified_base 12: mod_base = OTHER; note = 2-deoxy-2-fluoro ribonucleotide
  modified_base 14..16: mod_base = OTHER; note = 2-deoxy-2-fluoro ribonucleotide
  modified_base 18: mod_base = OTHER; note = 2-deoxy-2-fluoro ribonucleotide
  modified_base 5..6: mod_base = OTHER; note = phosphorothioate internucleotide linkage
  modified_base 6..7: mod_base = OTHER; note = phosphorothioate internucleotide linkage
tatatagttatcgaggctcattctca

SEQ ID NO: 1063 - RNA, 26 nt, synthetic construct
  source 1..26: mol_type = other RNA
  modified_base 1: mod_base = OTHER; note = 2'-OMe modified nucleotide
  modified_base 3: mod_base = OTHER; note = 2'-OMe modified nucleotide
  modified_base 5: mod_base = OTHER; note = 2'-OMe modified nucleotide
  modified_base 7: mod_base = OTHER; note = 2'-OMe modified nucleotide
  modified_base 9: mod_base = OTHER; note = 2'-OMe modified nucleotide
  modified_base 11: mod_base = OTHER; note = 2'-OMe modified nucleotide
  modified_base 13: mod_base = OTHER; note = 2'-OMe modified nucleotide
  modified_base 17: mod_base = OTHER; note = 2'-OMe modified nucleotide
  modified_base 19: mod_base = OTHER; note = 2'-OMe modified nucleotide
  modified_base 21: mod_base = OTHER; note = 2'-OMe modified nucleotide
  modified_base 23: mod_base = OTHER; note = 2'-OMe modified nucleotide
  modified_base 25: mod_base = OTHER; note = 2'-OMe modified nucleotide
  modified_base 6: mod_base = OTHER; note = 2-deoxy-2-fluoro ribonucleotide
  modified_base 8: mod_base = OTHER; note = 2-deoxy-2-fluoro ribonucleotide
  modified_base 10: mod_base = OTHER; note = 2-deoxy-2-fluoro ribonucleotide
  modified_base 12: mod_base = OTHER; note = 2-deoxy-2-fluoro ribonucleotide
  modified_base 14..16: mod_base = OTHER; note = 2-deoxy-2-fluoro ribonucleotide
  modified_base 18: mod_base = OTHER; note = 2-deoxy-2-fluoro ribonucleotide
  modified_base 20: mod_base = OTHER; note = 2-deoxy-2-fluoro ribonucleotide
  modified_base 22: mod_base = OTHER; note = 2-deoxy-2-fluoro ribonucleotide
  modified_base 24: mod_base = OTHER; note = 2-deoxy-2-fluoro ribonucleotide
  modified_base 26: mod_base = OTHER; note = 2-deoxy-2-fluoro ribonucleotide
  modified_base 5..6: mod_base = OTHER; note = phosphorothioate internucleotide linkage
  modified_base 6..7: mod_base = OTHER; note = phosphorothioate internucleotide linkage
tatatagttatcgaggctcattctca

SEQ ID NO: 1064 - RNA, 26 nt, synthetic construct
  source 1..26: mol_type = other RNA
  modified_base 1: mod_base = OTHER; note = 2'-OMe modified nucleotide
  modified_base 3: mod_base = OTHER; note = 2'-OMe modified nucleotide
  modified_base 5: mod_base = OTHER; note = 2'-OMe modified nucleotide
  modified_base 7: mod_base = OTHER; note = 2'-OMe modified nucleotide
  modified_base 9: mod_base = OTHER; note = 2'-OMe modified nucleotide
  modified_base 11: mod_base = OTHER; note = 2'-OMe modified nucleotide
  modified_base 13: mod_base = OTHER; note = 2'-OMe modified nucleotide
  modified_base 17: mod_base = OTHER; note = 2'-OMe modified nucleotide
  modified_base 19: mod_base = OTHER; note = 2'-OMe modified nucleotide
  modified_base 21: mod_base = OTHER; note = 2'-OMe modified nucleotide
  modified_base 23: mod_base = OTHER; note = 2'-OMe modified nucleotide
  modified_base 25: mod_base = OTHER; note = 2'-OMe modified nucleotide
  modified_base 6: mod_base = OTHER; note = 2-deoxy-2-fluoro ribonucleotide
  modified_base 8: mod_base = OTHER; note = 2-deoxy-2-fluoro ribonucleotide
  modified_base 10: mod_base = OTHER; note = 2-deoxy-2-fluoro ribonucleotide
  modified_base 12: mod_base = OTHER; note = 2-deoxy-2-fluoro ribonucleotide
  modified_base 14..16: mod_base = OTHER; note = 2-deoxy-2-fluoro ribonucleotide
  modified_base 18: mod_base = OTHER; note = 2-deoxy-2-fluoro ribonucleotide
  modified_base 20: mod_base = OTHER; note = 2-deoxy-2-fluoro ribonucleotide
  modified_base 22: mod_base = OTHER; note = 2-deoxy-2-fluoro ribonucleotide
  modified_base 24: mod_base = OTHER; note = 2-deoxy-2-fluoro ribonucleotide
  modified_base 26: mod_base = OTHER; note = 2-deoxy-2-fluoro ribonucleotide
  modified_base 5..6: mod_base = OTHER; note = phosphorothioate internucleotide linkage
  modified_base 6..7: mod_base = OTHER; note = phosphorothioate internucleotide linkage
tatatcagccccttattgttatacga

SEQ ID NO: 1065 - RNA, 26 nt, synthetic construct
  source 1..26: mol_type = other RNA
  modified_base 1: mod_base = OTHER; note = 2'-OMe modified nucleotide
  modified_base 3: mod_base = OTHER; note = 2'-OMe modified nucleotide
  modified_base 5: mod_base = OTHER; note = 2'-OMe modified nucleotide
  modified_base 7..9: mod_base = OTHER; note = 2'-OMe modified nucleotide
  modified_base 11: mod_base = OTHER; note = 2'-OMe modified nucleotide
  modified_base 13: mod_base = OTHER; note = 2'-OMe modified nucleotide
  modified_base 15: mod_base = OTHER; note = 2'-OMe modified nucleotide
  modified_base 17..19: mod_base = OTHER; note = 2'-OMe modified nucleotide
  modified_base 21: mod_base = OTHER; note = 2'-OMe modified nucleotide
  modified_base 23: mod_base = OTHER; note = 2'-OMe modified nucleotide
  modified_base 25..26: mod_base = OTHER; note = 2'-OMe modified nucleotide
  modified_base 6: mod_base = OTHER; note = 2-deoxy-2-fluoro ribonucleotide
  modified_base 10: mod_base = OTHER; note = 2-deoxy-2-fluoro ribonucleotide
  modified_base 12: mod_base = OTHER; note = 2-deoxy-2-fluoro ribonucleotide
  modified_base 14: mod_base = OTHER; note = 2-deoxy-2-fluoro ribonucleotide
  modified_base 16: mod_base = OTHER; note = 2-deoxy-2-fluoro ribonucleotide
  modified_base 20: mod_base = OTHER; note = 2-deoxy-2-fluoro ribonucleotide
  modified_base 22: mod_base = OTHER; note = 2-deoxy-2-fluoro ribonucleotide
  modified_base 24: mod_base = OTHER; note = 2-deoxy-2-fluoro ribonucleotide
  modified_base 5..6: mod_base = OTHER; note = phosphorothioate internucleotide linkage
  modified_base 6..7: mod_base = OTHER; note = phosphorothioate internucleotide linkage
tatatcagccccttattgttatacga

SEQ ID NO: 1066 - RNA, 26 nt, synthetic construct
  source 1..26: mol_type = other RNA
  modified_base 1: mod_base = OTHER; note = 2'-OMe modified nucleotide
  modified_base 3: mod_base = OTHER; note = 2'-OMe modified nucleotide
  modified_base 5: mod_base = OTHER; note = 2'-OMe modified nucleotide
  modified_base 7..9: mod_base = OTHER; note = 2'-OMe modified nucleotide
  modified_base 11: mod_base = OTHER; note = 2'-OMe modified nucleotide
  modified_base 13: mod_base = OTHER; note = 2'-OMe modified nucleotide
  modified_base 15: mod_base = OTHER; note = 2'-OMe modified nucleotide
  modified_base 17..23: mod_base = OTHER; note = 2'-OMe modified nucleotide
  modified_base 25..26: mod_base = OTHER; note = 2'-OMe modified nucleotide
  modified_base 6: mod_base = OTHER; note = 2-deoxy-2-fluoro ribonucleotide
  modified_base 10: mod_base = OTHER; note = 2-deoxy-2-fluoro ribonucleotide
  modified_base 12: mod_base = OTHER; note = 2-deoxy-2-fluoro ribonucleotide
  modified_base 14: mod_base = OTHER; note = 2-deoxy-2-fluoro ribonucleotide
  modified_base 16: mod_base = OTHER; note = 2-deoxy-2-fluoro ribonucleotide
  modified_base 24: mod_base = OTHER; note = 2-deoxy-2-fluoro ribonucleotide
  modified_base 5..6: mod_base = OTHER; note = phosphorothioate internucleotide linkage
  modified_base 6..7: mod_base = OTHER; note = phosphorothioate internucleotide linkage
tatatcagccccttattgttatacga

SEQ ID NO: 1067 - RNA, 26 nt, synthetic construct
  source 1..26: mol_type = other RNA
  modified_base 1: mod_base = OTHER; note = 2'-OMe modified nucleotide
  modified_base 3: mod_base = OTHER; note = 2'-OMe modified nucleotide
  modified_base 5..13: mod_base = OTHER; note = 2'-OMe modified nucleotide
  modified_base 15: mod_base = OTHER; note = 2'-OMe modified nucleotide
  modified_base 17..26: mod_base = OTHER; note = 2'-OMe modified nucleotide
  modified_base 14: mod_base = OTHER; note = 2-deoxy-2-fluoro ribonucleotide
  modified_base 16: mod_base = OTHER; note = 2-deoxy-2-fluoro ribonucleotide
  modified_base 5..6: mod_base = OTHER; note = phosphorothioate internucleotide linkage
  modified_base 6..7: mod_base = OTHER; note = phosphorothioate internucleotide linkage
tatatcagccccttattgttatacga

SEQ ID NO: 1068 - RNA, 26 nt, synthetic construct
  source 1..26: mol_type = other RNA
  modified_base 1: mod_base = OTHER; note = 2'-OMe modified nucleotide
  modified_base 3: mod_base = OTHER; note = 2'-OMe modified nucleotide
  modified_base 5..14: mod_base = OTHER; note = 2'-OMe modified nucleotide
  modified_base 17..26: mod_base = OTHER; note = 2'-OMe modified nucleotide
  modified_base 15..16: mod_base = OTHER; note = 2-deoxy-2-fluoro ribonucleotide
  modified_base 5..6: mod_base = OTHER; note = phosphorothioate internucleotide linkage
  modified_base 6..7: mod_base = OTHER; note = phosphorothioate internucleotide linkage
tatatcagccccttattgttatacga

SEQ ID NO: 1069 - RNA, 26 nt, synthetic construct
  source 1..26: mol_type = other RNA
  modified_base 1: mod_base = OTHER; note = 2'-OMe modified nucleotide
  modified_base 3: mod_base = OTHER; note = 2'-OMe modified nucleotide
  modified_base 5: mod_base = OTHER; note = 2'-OMe modified nucleotide
  modified_base 7..9: mod_base = OTHER; note = 2'-OMe modified nucleotide
  modified_base 11: mod_base = OTHER; note = 2'-OMe modified nucleotide
  modified_base 13: mod_base = OTHER; note = 2'-OMe modified nucleotide
  modified_base 17..19: mod_base = OTHER; note = 2'-OMe modified nucleotide
  modified_base 21: mod_base = OTHER; note = 2'-OMe modified nucleotide
  modified_base 23: mod_base = OTHER; note = 2'-OMe modified nucleotide
  modified_base 25..26: mod_base = OTHER; note = 2'-OMe modified nucleotide
  modified_base 6: mod_base = OTHER; note = 2-deoxy-2-fluoro ribonucleotide
  modified_base 10: mod_base = OTHER; note = 2-deoxy-2-fluoro ribonucleotide
  modified_base 12: mod_base = OTHER; note = 2-deoxy-2-fluoro ribonucleotide
  modified_base 14..16: mod_base = OTHER; note = 2-deoxy-2-fluoro ribonucleotide
  modified_base 20: mod_base = OTHER; note = 2-deoxy-2-fluoro ribonucleotide
  modified_base 22: mod_base = OTHER; note = 2-deoxy-2-fluoro ribonucleotide
  modified_base 24: mod_base = OTHER; note = 2-deoxy-2-fluoro ribonucleotide
  modified_base 5..6: mod_base = OTHER; note = phosphorothioate internucleotide linkage
  modified_base 6..7: mod_base = OTHER; note = phosphorothioate internucleotide linkage
tatatcagccccttattgttatacga

SEQ ID NO: 1070 - RNA, 26 nt, synthetic construct
  source 1..26: mol_type = other RNA
  modified_base 1: mod_base = OTHER; note = 2'-OMe modified nucleotide
  modified_base 3: mod_base = OTHER; note = 2'-OMe modified nucleotide
  modified_base 5: mod_base = OTHER; note = 2'-OMe modified nucleotide
  modified_base 7..9: mod_base = OTHER; note = 2'-OMe modified nucleotide
  modified_base 11: mod_base = OTHER; note = 2'-OMe modified nucleotide
  modified_base 13: mod_base = OTHER; note = 2'-OMe modified nucleotide
  modified_base 17..23: mod_base = OTHER; note = 2'-OMe modified nucleotide
  modified_base 25..26: mod_base = OTHER; note = 2'-OMe modified nucleotide
  modified_base 6: mod_base = OTHER; note = 2-deoxy-2-fluoro ribonucleotide
  modified_base 10: mod_base = OTHER; note = 2-deoxy-2-fluoro ribonucleotide
  modified_base 12: mod_base = OTHER; note = 2-deoxy-2-fluoro ribonucleotide
  modified_base 14..16: mod_base = OTHER; note = 2-deoxy-2-fluoro ribonucleotide
  modified_base 24: mod_base = OTHER; note = 2-deoxy-2-fluoro ribonucleotide
  modified_base 5..6: mod_base = OTHER; note = phosphorothioate internucleotide linkage
  modified_base 6..7: mod_base = OTHER; note = phosphorothioate internucleotide linkage
tatatcagccccttattgttatacga

SEQ ID NO: 1071 - RNA, 26 nt, synthetic construct
  source 1..26: mol_type = other RNA
  modified_base 1: mod_base = OTHER; note = 2'-OMe modified nucleotide
  modified_base 3: mod_base = OTHER; note = 2'-OMe modified nucleotide
  modified_base 5..13: mod_base = OTHER; note = 2'-OMe modified nucleotide
  modified_base 17..26: mod_base = OTHER; note = 2'-OMe modified nucleotide
  modified_base 14..16: mod_base = OTHER; note = 2-deoxy-2-fluoro ribonucleotide
  modified_base 5..6: mod_base = OTHER; note = phosphorothioate internucleotide linkage
  modified_base 6..7: mod_base = OTHER; note = phosphorothioate internucleotide linkage
tatatcagccccttattgttatacga

SEQ ID NO: 1072 - RNA, 26 nt, synthetic construct
  source 1..26: mol_type = other RNA
  modified_base 1: mod_base = OTHER; note = 2'-OMe modified nucleotide
  modified_base 3: mod_base = OTHER; note = 2'-OMe modified nucleotide
  modified_base 5: mod_base = OTHER; note = 2'-OMe modified nucleotide
  modified_base 7..9: mod_base = OTHER; note = 2'-OMe modified nucleotide
  modified_base 11: mod_base = OTHER; note = 2'-OMe modified nucleotide
  modified_base 13..14: mod_base = OTHER; note = 2'-OMe modified nucleotide
  modified_base 17..23: mod_base = OTHER; note = 2'-OMe modified nucleotide
  modified_base 25..26: mod_base = OTHER; note = 2'-OMe modified nucleotide
  modified_base 6: mod_base = OTHER; note = 2-deoxy-2-fluoro ribonucleotide
  modified_base 10: mod_base = OTHER; note = 2-deoxy-2-fluoro ribonucleotide
  modified_base 12: mod_base = OTHER; note = 2-deoxy-2-fluoro ribonucleotide
  modified_base 15..16: mod_base = OTHER; note = 2-deoxy-2-fluoro ribonucleotide
  modified_base 24: mod_base = OTHER; note = 2-deoxy-2-fluoro ribonucleotide
  modified_base 5..6: mod_base = OTHER; note = phosphorothioate internucleotide linkage
  modified_base 6..7: mod_base = OTHER; note = phosphorothioate internucleotide linkage
tatatcagccccttattgttatacga

SEQ ID NO: 1073 - RNA, 26 nt, synthetic construct
  source 1..26: mol_type = other RNA
  modified_base 1: mod_base = OTHER; note = 2'-OMe modified nucleotide
  modified_base 3: mod_base = OTHER; note = 2'-OMe modified nucleotide
  modified_base 5..13: mod_base = OTHER; note = 2'-OMe modified nucleotide
  modified_base 15: mod_base = OTHER; note = 2'-OMe modified nucleotide
  modified_base 17..26: mod_base = OTHER; note = 2'-OMe modified nucleotide
  modified_base 14: mod_base = OTHER; note = 2-deoxy-2-fluoro ribonucleotide
  modified_base 16: mod_base = OTHER; note = 2-deoxy-2-fluoro ribonucleotide
  modified_base 5..6: mod_base = OTHER; note = phosphorothioate internucleotide linkage
  modified_base 6..7: mod_base = OTHER; note = phosphorothioate internucleotide linkage
tatatcagccccttattgttatacga

SEQ ID NO: 1074 - RNA, 26 nt, synthetic construct
  source 1..26: mol_type = other RNA
  modified_base 1: mod_base = OTHER; note = 2'-OMe modified nucleotide
  modified_base 3: mod_base = OTHER; note = 2'-OMe modified nucleotide
  modified_base 5: mod_base = OTHER; note = 2'-OMe modified nucleotide
  modified_base 7..9: mod_base = OTHER; note = 2'-OMe modified nucleotide
  modified_base 11: mod_base = OTHER; note = 2'-OMe modified nucleotide
  modified_base 13: mod_base = OTHER; note = 2'-OMe modified nucleotide
  modified_base 15: mod_base = OTHER; note = 2'-OMe modified nucleotide
  modified_base 17..19: mod_base = OTHER; note = 2'-OMe modified nucleotide
  modified_base 21: mod_base = OTHER; note = 2'-OMe modified nucleotide
  modified_base 23: mod_base = OTHER; note = 2'-OMe modified nucleotide
  modified_base 25..26: mod_base = OTHER; note = 2'-OMe modified nucleotide
  modified_base 6: mod_base = OTHER; note = 2-deoxy-2-fluoro ribonucleotide
  modified_base 10: mod_base = OTHER; note = 2-deoxy-2-fluoro ribonucleotide
  modified_base 12: mod_base = OTHER; note = 2-deoxy-2-fluoro ribonucleotide
  modified_base 14: mod_base = OTHER; note = 2-deoxy-2-fluoro ribonucleotide
  modified_base 16: mod_base = OTHER; note = 2-deoxy-2-fluoro ribonucleotide
  modified_base 20: mod_base = OTHER; note = 2-deoxy-2-fluoro ribonucleotide
  modified_base 22: mod_base = OTHER; note = 2-deoxy-2-fluoro ribonucleotide
  modified_base 24: mod_base = OTHER; note = 2-deoxy-2-fluoro ribonucleotide
  modified_base 5..6: mod_base = OTHER; note = phosphorothioate internucleotide linkage
  modified_base 6..7: mod_base = OTHER; note = phosphorothioate internucleotide linkage
tatatcagccccttattgttatacga

SEQ ID NO: 1075 - RNA, 26 nt, synthetic construct
  source 1..26: mol_type = other RNA
  modified_base 1: mod_base = OTHER; note = 2'-OMe modified nucleotide
  modified_base 3: mod_base = OTHER; note = 2'-OMe modified nucleotide
  modified_base 5: mod_base = OTHER; note = 2'-OMe modified nucleotide
  modified_base 7..9: mod_base = OTHER; note = 2'-OMe modified nucleotide
  modified_base 11: mod_base = OTHER; note = 2'-OMe modified nucleotide
  modified_base 13: mod_base = OTHER; note = 2'-OMe modified nucleotide
  modified_base 15: mod_base = OTHER; note = 2'-OMe modified nucleotide
  modified_base 17..23: mod_base = OTHER; note = 2'-OMe modified nucleotide
  modified_base 25..26: mod_base = OTHER; note = 2'-OMe modified nucleotide
  modified_base 6: mod_base = OTHER; note = 2-deoxy-2-fluoro ribonucleotide
  modified_base 10: mod_base = OTHER; note = 2-deoxy-2-fluoro ribonucleotide
  modified_base 12: mod_base = OTHER; note = 2-deoxy-2-fluoro ribonucleotide
  modified_base 14: mod_base = OTHER; note = 2-deoxy-2-fluoro ribonucleotide
  modified_base 16: mod_base = OTHER; note = 2-deoxy-2-fluoro ribonucleotide
  modified_base 24: mod_base = OTHER; note = 2-deoxy-2-fluoro ribonucleotide
  modified_base 5..6: mod_base = OTHER; note = phosphorothioate internucleotide linkage
  modified_base 6..7: mod_base = OTHER; note = phosphorothioate internucleotide linkage
tatatcagccccttattgttatacga

SEQ ID NO: 1076 - RNA, 26 nt, synthetic construct
  source 1..26: mol_type = other RNA
  modified_base 1: mod_base = OTHER; note = 2'-OMe modified nucleotide
  modified_base 3: mod_base = OTHER; note = 2'-OMe modified nucleotide
  modified_base 5..14: mod_base = OTHER; note = 2'-OMe modified nucleotide
  modified_base 17..26: mod_base = OTHER; note = 2'-OMe modified nucleotide
  modified_base 15..16: mod_base = OTHER; note = 2-deoxy-2-fluoro ribonucleotide
  modified_base 5..6: mod_base = OTHER; note = phosphorothioate internucleotide linkage
  modified_base 6..7: mod_base = OTHER; note = phosphorothioate internucleotide linkage
tatatcagccccttattgttatacga

SEQ ID NO: 1077 - RNA, 26 nt, synthetic construct
  source 1..26: mol_type = other RNA
  modified_base 1: mod_base = OTHER; note = 2'-OMe modified nucleotide
  modified_base 3: mod_base = OTHER; note = 2'-OMe modified nucleotide
  modified_base 5: mod_base = OTHER; note = 2'-OMe modified nucleotide
  modified_base 7..9: mod_base = OTHER; note = 2'-OMe modified nucleotide
  modified_base 11: mod_base = OTHER; note = 2'-OMe modified nucleotide
  modified_base 13: mod_base = OTHER; note = 2'-OMe modified nucleotide
  modified_base 17..19: mod_base = OTHER; note = 2'-OMe modified nucleotide
  modified_base 21: mod_base = OTHER; note = 2'-OMe modified nucleotide
  modified_base 23: mod_base = OTHER; note = 2'-OMe modified nucleotide
  modified_base 25..26: mod_base = OTHER; note = 2'-OMe modified nucleotide
  modified_base 6: mod_base = OTHER; note = 2-deoxy-2-fluoro ribonucleotide
  modified_base 10: mod_base = OTHER; note = 2-deoxy-2-fluoro ribonucleotide
  modified_base 12: mod_base = OTHER; note = 2-deoxy-2-fluoro ribonucleotide
  modified_base 14..16: mod_base = OTHER; note = 2-deoxy-2-fluoro ribonucleotide
  modified_base 20: mod_base = OTHER; note = 2-deoxy-2-fluoro ribonucleotide
  modified_base 22: mod_base = OTHER; note = 2-deoxy-2-fluoro ribonucleotide
  modified_base 24: mod_base = OTHER; note = 2-deoxy-2-fluoro ribonucleotide
  modified_base 5..6: mod_base = OTHER; note = phosphorothioate internucleotide linkage
  modified_base 6..7: mod_base = OTHER; note = phosphorothioate internucleotide linkage
tatatcagccccttattgttatacga

SEQ ID NO: 1078 - RNA, 26 nt, synthetic construct
  source 1..26: mol_type = other RNA
  modified_base 1: mod_base = OTHER; note = 2'-OMe modified nucleotide
  modified_base 3: mod_base = OTHER; note = 2'-OMe modified nucleotide
  modified_base 5: mod_base = OTHER; note = 2'-OMe modified nucleotide
  modified_base 7..9: mod_base = OTHER; note = 2'-OMe modified nucleotide
  modified_base 11: mod_base = OTHER; note = 2'-OMe modified nucleotide
  modified_base 13: mod_base = OTHER; note = 2'-OMe modified nucleotide
  modified_base 17..23: mod_base = OTHER; note = 2'-OMe modified nucleotide
  modified_base 25..26: mod_base = OTHER; note = 2'-OMe modified nucleotide
  modified_base 6: mod_base = OTHER; note = 2-deoxy-2-fluoro ribonucleotide
  modified_base 10: mod_base = OTHER; note = 2-deoxy-2-fluoro ribonucleotide
  modified_base 12: mod_base = OTHER; note = 2-deoxy-2-fluoro ribonucleotide
  modified_base 14..16: mod_base = OTHER; note = 2-deoxy-2-fluoro ribonucleotide
  modified_base 24: mod_base = OTHER; note = 2-deoxy-2-fluoro ribonucleotide
  modified_base 5..6: mod_base = OTHER; note = phosphorothioate internucleotide linkage
  modified_base 6..7: mod_base = OTHER; note = phosphorothioate internucleotide linkage
tatatcagccccttattgttatacga

SEQ ID NO: 1079 - RNA, 26 nt, synthetic construct
  source 1..26: mol_type = other RNA
  modified_base 1: mod_base = OTHER; note = 2'-OMe modified nucleotide
  modified_base 3: mod_base = OTHER; note = 2'-OMe modified nucleotide
  modified_base 5..13: mod_base = OTHER; note = 2'-OMe modified nucleotide
  modified_base 17..26: mod_base = OTHER; note = 2'-OMe modified nucleotide
  modified_base 14..16: mod_base = OTHER; note = 2-deoxy-2-fluoro ribonucleotide
  modified_base 5..6: mod_base = OTHER; note = phosphorothioate internucleotide linkage
  modified_base 6..7: mod_base = OTHER; note = phosphorothioate internucleotide linkage
tatatcagccccttattgttatacga

SEQ ID NO: 1080 - RNA, 26 nt, synthetic construct
  source 1..26: mol_type = other RNA
  modified_base 1: mod_base = OTHER; note = 2'-OMe modified nucleotide
  modified_base 3: mod_base = OTHER; note = 2'-OMe modified nucleotide
  modified_base 5: mod_base = OTHER; note = 2'-OMe modified nucleotide
  modified_base 7..9: mod_base = OTHER; note = 2'-OMe modified nucleotide
  modified_base 11: mod_base = OTHER; note = 2'-OMe modified nucleotide
  modified_base 13..14: mod_base = OTHER; note = 2'-OMe modified nucleotide
  modified_base 17..23: mod_base = OTHER; note = 2'-OMe modified nucleotide
  modified_base 25..26: mod_base = OTHER; note = 2'-OMe modified nucleotide
  modified_base 6: mod_base = OTHER; note = 2-deoxy-2-fluoro ribonucleotide
  modified_base 10: mod_base = OTHER; note = 2-deoxy-2-fluoro ribonucleotide
  modified_base 12: mod_base = OTHER; note = 2-deoxy-2-fluoro ribonucleotide
  modified_base 15..16: mod_base = OTHER; note = 2-deoxy-2-fluoro ribonucleotide
  modified_base 24: mod_base = OTHER; note = 2-deoxy-2-fluoro ribonucleotide
  modified_base 5..6: mod_base = OTHER; note = phosphorothioate internucleotide linkage
  modified_base 6..7: mod_base = OTHER; note = phosphorothioate internucleotide linkage
tatatcagccccttattgttatacga

SEQ ID NO: 1081 - RNA, 26 nt, synthetic construct
  source 1..26: mol_type = other RNA
  modified_base 1: mod_base = OTHER; note = 2'-OMe modified nucleotide
  modified_base 3: mod_base = OTHER; note = 2'-OMe modified nucleotide
  modified_base 5..13: mod_base = OTHER; note = 2'-OMe modified nucleotide
  modified_base 17..26: mod_base = OTHER; note = 2'-OMe modified nucleotide
  modified_base 14..16: mod_base = OTHER; note = 2-deoxy-2-fluoro ribonucleotide
  modified_base 5..6: mod_base = OTHER; note = phosphorothioate internucleotide linkage
  modified_base 6..7: mod_base = OTHER; note = phosphorothioate internucleotide linkage
tatatagttatcgaggctcattctca

SEQ ID NO: 1082 - RNA, 26 nt, synthetic construct
  source 1..26: mol_type = other RNA
  modified_base 26: mod_base = OTHER; note = inverted deoxyribonucleotide
  modified_base 1: mod_base = OTHER; note = 2'-OMe modified nucleotide
  modified_base 3: mod_base = OTHER; note = 2'-OMe modified nucleotide
  modified_base 5..14: mod_base = OTHER; note = 2'-OMe modified nucleotide
  modified_base 17..25: mod_base = OTHER; note = 2'-OMe modified nucleotide
  modified_base 15..16: mod_base = OTHER; note = 2-deoxy-2-fluoro ribonucleotide
  modified_base 5..6: mod_base = OTHER; note = phosphorothioate internucleotide linkage
  modified_base 6..7: mod_base = OTHER; note = phosphorothioate internucleotide linkage
tatatagttatcgaggctcattctca

SEQ ID NO: 1083 - RNA, 26 nt, synthetic construct
  source 1..26: mol_type = other RNA
  modified_base 1: mod_base = OTHER; note = 2'-OMe modified nucleotide
  modified_base 3: mod_base = OTHER; note = 2'-OMe modified nucleotide
  modified_base 5..14: mod_base = OTHER; note = 2'-OMe modified nucleotide
  modified_base 17..26: mod_base = OTHER; note = 2'-OMe modified nucleotide
  modified_base 15..16: mod_base = OTHER; note = 2-deoxy-2-fluoro ribonucleotide
  modified_base 5..6: mod_base = OTHER; note = phosphorothioate internucleotide linkage
  modified_base 6..7: mod_base = OTHER; note = phosphorothioate internucleotide linkage
tatatagttatcgaggctcattctca

SEQ ID NO: 1084 - RNA, 26 nt, synthetic construct
  source 1..26: mol_type = other RNA
  modified_base 1: mod_base = OTHER; note = 2'-OMe modified nucleotide
  modified_base 3: mod_base = OTHER; note = 2'-OMe modified nucleotide
  modified_base 5: mod_base = OTHER; note = 2'-OMe modified nucleotide
  modified_base 7: mod_base = OTHER; note = 2'-OMe modified nucleotide
  modified_base 9: mod_base = OTHER; note = 2'-OMe modified nucleotide
  modified_base 11: mod_base = OTHER; note = 2'-OMe modified nucleotide
  modified_base 13: mod_base = OTHER; note = 2'-OMe modified nucleotide
  modified_base 17: mod_base = OTHER; note = 2'-OMe modified nucleotide
  modified_base 19: mod_base = OTHER; note = 2'-OMe modified nucleotide
  modified_base 21: mod_base = OTHER; note = 2'-OMe modified nucleotide
  modified_base 23: mod_base = OTHER; note = 2'-OMe modified nucleotide
  modified_base 25: mod_base = OTHER; note = 2'-OMe modified nucleotide
  modified_base 26: mod_base = OTHER; note = inverted deoxyribonucleotide
  modified_base 6: mod_base = OTHER; note = 2-deoxy-2-fluoro ribonucleotide
  modified_base 8: mod_base = OTHER; note = 2-deoxy-2-fluoro ribonucleotide
  modified_base 10: mod_base = OTHER; note = 2-deoxy-2-fluoro ribonucleotide
  modified_base 12: mod_base = OTHER; note = 2-deoxy-2-fluoro ribonucleotide
  modified_base 14..16: mod_base = OTHER; note = 2-deoxy-2-fluoro ribonucleotide
  modified_base 18: mod_base = OTHER; note = 2-deoxy-2-fluoro ribonucleotide
  modified_base 20: mod_base = OTHER; note = 2-deoxy-2-fluoro ribonucleotide
  modified_base 22: mod_base = OTHER; note = 2-deoxy-2-fluoro ribonucleotide
  modified_base 24: mod_base = OTHER; note = 2-deoxy-2-fluoro ribonucleotide
  modified_base 5..6: mod_base = OTHER; note = phosphorothioate internucleotide linkage
tatatagttatcgaggctcattctca

SEQ ID NO: 1085 - RNA, 17 nt, synthetic construct
  source 1..17: mol_type = other RNA
  modified_base 2: mod_base = OTHER; note = 2'-OMe modified nucleotide
  modified_base 4: mod_base = OTHER; note = 2'-OMe modified nucleotide
  modified_base 6: mod_base = OTHER; note = 2'-OMe modified nucleotide
  modified_base 8: mod_base = OTHER; note = 2'-OMe modified nucleotide
  modified_base 10: mod_base = OTHER; note = 2'-OMe modified nucleotide
  modified_base 12: mod_base = OTHER; note = 2'-OMe modified nucleotide
  modified_base 14: mod_base = OTHER; note = 2'-OMe modified nucleotide
  modified_base 16..17: mod_base = OTHER; note = 2'-OMe modified nucleotide
  modified_base 1: mod_base = OTHER; note = 2-deoxy-2-fluoro ribonucleotide
  modified_base 3: mod_base = OTHER; note = 2-deoxy-2-fluoro ribonucleotide
  modified_base 5: mod_base = OTHER; note = 2-deoxy-2-fluoro ribonucleotide
  modified_base 7: mod_base = OTHER; note = 2-deoxy-2-fluoro ribonucleotide
  modified_base 9: mod_base = OTHER; note = 2-deoxy-2-fluoro ribonucleotide
  modified_base 11: mod_base = OTHER; note = 2-deoxy-2-fluoro ribonucleotide
  modified_base 13: mod_base = OTHER; note = 2-deoxy-2-fluoro ribonucleotide
  modified_base 15: mod_base = OTHER; note = 2-deoxy-2-fluoro ribonucleotide
  modified_base 1..2: mod_base = OTHER; note = phosphorothioate internucleotide linkage
  modified_base 2..3: mod_base = OTHER; note = phosphorothioate internucleotide linkage
ccccttattgttataca

SEQ ID NO: 1086 - RNA, 17 nt, synthetic construct
  source 1..17: mol_type = other RNA
  modified_base 2: mod_base = OTHER; note = 2'-OMe modified nucleotide
  modified_base 4: mod_base = OTHER; note = 2'-OMe modified nucleotide
  modified_base 6: mod_base = OTHER; note = 2'-OMe modified nucleotide
  modified_base 8: mod_base = OTHER; note = 2'-OMe modified nucleotide
  modified_base 10: mod_base = OTHER; note = 2'-OMe modified nucleotide
  modified_base 12: mod_base = OTHER; note = 2'-OMe modified nucleotide
  modified_base 14: mod_base = OTHER; note = 2'-OMe modified nucleotide
  modified_base 16..17: mod_base = OTHER; note = 2'-OMe modified nucleotide
  modified_base 1: mod_base = OTHER; note = 2-deoxy-2-fluoro ribonucleotide
  modified_base 3: mod_base = OTHER; note = 2-deoxy-2-fluoro ribonucleotide
  modified_base 5: mod_base = OTHER; note = 2-deoxy-2-fluoro ribonucleotide
  modified_base 7: mod_base = OTHER; note = 2-deoxy-2-fluoro ribonucleotide
  modified_base 9: mod_base = OTHER; note = 2-deoxy-2-fluoro ribonucleotide
  modified_base 11: mod_base = OTHER; note = 2-deoxy-2-fluoro ribonucleotide
  modified_base 13: mod_base = OTHER; note = 2-deoxy-2-fluoro ribonucleotide
  modified_base 15: mod_base = OTHER; note = 2-deoxy-2-fluoro ribonucleotide
  modified_base 1..2: mod_base = OTHER; note = phosphorothioate internucleotide linkage
  modified_base 2..3: mod_base = OTHER; note = phosphorothioate internucleotide linkage
cccttattgttatacga

SEQ ID NO: 1087 - RNA, 17 nt, synthetic construct
  source 1..17: mol_type = other RNA
  modified_base 2: mod_base = OTHER; note = 2'-OMe modified nucleotide
  modified_base 4: mod_base = OTHER; note = 2'-OMe modified nucleotide
  modified_base 6: mod_base = OTHER; note = 2'-OMe modified nucleotide
  modified_base 8: mod_base = OTHER; note = 2'-OMe modified nucleotide
  modified_base 10: mod_base = OTHER; note = 2'-OMe modified nucleotide
  modified_base 12: mod_base = OTHER; note = 2'-OMe modified nucleotide
  modified_base 14: mod_base = OTHER; note = 2'-OMe modified nucleotide
  modified_base 16..17: mod_base = OTHER; note = 2'-OMe modified nucleotide
  modified_base 1: mod_base = OTHER; note = 2-deoxy-2-fluoro ribonucleotide
  modified_base 3: mod_base = OTHER; note = 2-deoxy-2-fluoro ribonucleotide
  modified_base 5: mod_base = OTHER; note = 2-deoxy-2-fluoro ribonucleotide
  modified_base 7: mod_base = OTHER; note = 2-deoxy-2-fluoro ribonucleotide
  modified_base 9: mod_base = OTHER; note = 2-deoxy-2-fluoro ribonucleotide
  modified_base 11: mod_base = OTHER; note = 2-deoxy-2-fluoro ribonucleotide
  modified_base 13: mod_base = OTHER; note = 2-deoxy-2-fluoro ribonucleotide
  modified_base 15: mod_base = OTHER; note = 2-deoxy-2-fluoro ribonucleotide
  modified_base 1..2: mod_base = OTHER; note = phosphorothioate internucleotide linkage
  modified_base 2..3: mod_base = OTHER; note = phosphorothioate internucleotide linkage
agatgctgagattcgca

SEQ ID NO: 1088 - RNA, 17 nt, synthetic construct
  source 1..17: mol_type = other RNA
  modified_base 2: mod_base = OTHER; note = 2'-OMe modified nucleotide
  modified_base 4: mod_base = OTHER; note = 2'-OMe modified nucleotide
  modified_base 6: mod_base = OTHER; note = 2'-OMe modified nucleotide
  modified_base 8: mod_base = OTHER; note = 2'-OMe modified nucleotide
  modified_base 10: mod_base = OTHER; note = 2'-OMe modified nucleotide
  modified_base 12: mod_base = OTHER; note = 2'-OMe modified nucleotide
  modified_base 14: mod_base = OTHER; note = 2'-OMe modified nucleotide
  modified_base 16..17: mod_base = OTHER; note = 2'-OMe modified nucleotide
  modified_base 1: mod_base = OTHER; note = 2-deoxy-2-fluoro ribonucleotide
  modified_base 3: mod_base = OTHER; note = 2-deoxy-2-fluoro ribonucleotide
  modified_base 5: mod_base = OTHER; note = 2-deoxy-2-fluoro ribonucleotide
  modified_base 7: mod_base = OTHER; note = 2-deoxy-2-fluoro ribonucleotide
  modified_base 9: mod_base = OTHER; note = 2-deoxy-2-fluoro ribonucleotide
  modified_base 11: mod_base = OTHER; note = 2-deoxy-2-fluoro ribonucleotide
  modified_base 13: mod_base = OTHER; note = 2-deoxy-2-fluoro ribonucleotide
  modified_base 15: mod_base = OTHER; note = 2-deoxy-2-fluoro ribonucleotide
  modified_base 1..2: mod_base = OTHER; note = phosphorothioate internucleotide linkage
  modified_base 2..3: mod_base = OTHER; note = phosphorothioate internucleotide linkage
gttatcgaggctcatta

SEQ ID NO: 1089 - RNA, 17 nt, synthetic construct
  source 1..17: mol_type = other RNA
  modified_base 2: mod_base = OTHER; note = 2'-OMe modified nucleotide
  modified_base 4: mod_base = OTHER; note = 2'-OMe modified nucleotide
  modified_base 6: mod_base = OTHER; note = 2'-OMe modified nucleotide
  modified_base 8: mod_base = OTHER; note = 2'-OMe modified nucleotide
  modified_base 10: mod_base = OTHER; note = 2'-OMe modified nucleotide
  modified_base 12: mod_base = OTHER; note = 2'-OMe modified nucleotide
  modified_base 14: mod_base = OTHER; note = 2'-OMe modified nucleotide
  modified_base 16..17: mod_base = OTHER; note = 2'-OMe modified nucleotide
  modified_base 1: mod_base = OTHER; note = 2-deoxy-2-fluoro ribonucleotide
  modified_base 3: mod_base = OTHER; note = 2-deoxy-2-fluoro ribonucleotide
  modified_base 5: mod_base = OTHER; note = 2-deoxy-2-fluoro ribonucleotide
  modified_base 7: mod_base = OTHER; note = 2-deoxy-2-fluoro ribonucleotide
  modified_base 9: mod_base = OTHER; note = 2-deoxy-2-fluoro ribonucleotide
  modified_base 11: mod_base = OTHER; note = 2-deoxy-2-fluoro ribonucleotide
  modified_base 13: mod_base = OTHER; note = 2-deoxy-2-fluoro ribonucleotide
  modified_base 15: mod_base = OTHER; note = 2-deoxy-2-fluoro ribonucleotide
  modified_base 1..2: mod_base = OTHER; note = phosphorothioate internucleotide linkage
  modified_base 2..3: mod_base = OTHER; note = phosphorothioate internucleotide linkage
atcgaggctcattctca

SEQ ID NO: 1090 - RNA, 17 nt, synthetic construct
  source 1..17: mol_type = other RNA
  modified_base 2: mod_base = OTHER; note = 2'-OMe modified nucleotide
  modified_base 4: mod_base = OTHER; note = 2'-OMe modified nucleotide
  modified_base 6: mod_base = OTHER; note = 2'-OMe modified nucleotide
  modified_base 8: mod_base = OTHER; note = 2'-OMe modified nucleotide
  modified_base 10: mod_base = OTHER; note = 2'-OMe modified nucleotide
  modified_base 12: mod_base = OTHER; note = 2'-OMe modified nucleotide
  modified_base 14: mod_base = OTHER; note = 2'-OMe modified nucleotide
  modified_base 16..17: mod_base = OTHER; note = 2'-OMe modified nucleotide
  modified_base 1: mod_base = OTHER; note = 2-deoxy-2-fluoro ribonucleotide
  modified_base 3: mod_base = OTHER; note = 2-deoxy-2-fluoro ribonucleotide
  modified_base 5: mod_base = OTHER; note = 2-deoxy-2-fluoro ribonucleotide
  modified_base 7: mod_base = OTHER; note = 2-deoxy-2-fluoro ribonucleotide
  modified_base 9: mod_base = OTHER; note = 2-deoxy-2-fluoro ribonucleotide
  modified_base 11: mod_base = OTHER; note = 2-deoxy-2-fluoro ribonucleotide
  modified_base 13: mod_base = OTHER; note = 2-deoxy-2-fluoro ribonucleotide
  modified_base 15: mod_base = OTHER; note = 2-deoxy-2-fluoro ribonucleotide
  modified_base 1..2: mod_base = OTHER; note = phosphorothioate internucleotide linkage
  modified_base 2..3: mod_base = OTHER; note = phosphorothioate internucleotide linkage
aacagaatcaggtgtca

SEQ ID NO: 1091 - RNA, 26 nt, synthetic construct
  source 1..26: mol_type = other RNA
  modified_base 1: mod_base = OTHER; note = 2'-OMe modified nucleotide
  modified_base 3: mod_base = OTHER; note = 2'-OMe modified nucleotide
  modified_base 5..14: mod_base = OTHER; note = 2'-OMe modified nucleotide
  modified_base 17..26: mod_base = OTHER; note = 2'-OMe modified nucleotide
  modified_base 15..16: mod_base = OTHER; note = 2-deoxy-2-fluoro ribonucleotide
  modified_base 5..6: mod_base = OTHER; note = phosphorothioate internucleotide linkage
  modified_base 6..7: mod_base = OTHER; note = phosphorothioate internucleotide linkage
tatatagttatcgaggctcattctca

SEQ ID NO: 1092 - RNA, 26 nt, synthetic construct
  source 1..26: mol_type = other RNA
  modified_base 1: mod_base = OTHER; note = 2'-OMe modified nucleotide
  modified_base 3: mod_base = OTHER; note = 2'-OMe modified nucleotide
  modified_base 5: mod_base = OTHER; note = 2'-OMe modified nucleotide
  modified_base 7: mod_base = OTHER; note = 2'-OMe modified nucleotide
  modified_base 9: mod_base = OTHER; note = 2'-OMe modified nucleotide
  modified_base 11: mod_base = OTHER; note = 2'-OMe modified nucleotide
  modified_base 13: mod_base = OTHER; note = 2'-OMe modified nucleotide
  modified_base 17: mod_base = OTHER; note = 2'-OMe modified nucleotide
  modified_base 19: mod_base = OTHER; note = 2'-OMe modified nucleotide
  modified_base 21: mod_base = OTHER; note = 2'-OMe modified nucleotide
  modified_base 23: mod_base = OTHER; note = 2'-OMe modified nucleotide
  modified_base 25..26: mod_base = OTHER; note = 2'-OMe modified nucleotide
  modified_base 6: mod_base = OTHER; note = 2-deoxy-2-fluoro ribonucleotide
  modified_base 8: mod_base = OTHER; note = 2-deoxy-2-fluoro ribonucleotide
  modified_base 10: mod_base = OTHER; note = 2-deoxy-2-fluoro ribonucleotide
  modified_base 12: mod_base = OTHER; note = 2-deoxy-2-fluoro ribonucleotide
  modified_base 14..16: mod_base = OTHER; note = 2-deoxy-2-fluoro ribonucleotide
  modified_base 18: mod_base = OTHER; note = 2-deoxy-2-fluoro ribonucleotide
  modified_base 20: mod_base = OTHER; note = 2-deoxy-2-fluoro ribonucleotide
  modified_base 22: mod_base = OTHER; note = 2-deoxy-2-fluoro ribonucleotide
  modified_base 24: mod_base = OTHER; note = 2-deoxy-2-fluoro ribonucleotide
  modified_base 5..6: mod_base = OTHER; note = phosphorothioate internucleotide linkage
  modified_base 6..7: mod_base = OTHER; note = phosphorothioate internucleotide linkage
tatatcagccccttattgttatacga

SEQ ID NO: 1093 - RNA, 26 nt, synthetic construct
  source 1..26: mol_type = other RNA
  modified_base 1: mod_base = OTHER; note = 2'-OMe modified nucleotide
  modified_base 3: mod_base = OTHER; note = 2'-OMe modified nucleotide
  modified_base 5..11: mod_base = OTHER; note = 2'-OMe modified nucleotide
  modified_base 13: mod_base = OTHER; note = 2'-OMe modified nucleotide
  modified_base 15: mod_base = OTHER; note = 2'-OMe modified nucleotide
  modified_base 17..26: mod_base = OTHER; note = 2'-OMe modified nucleotide
  modified_base 12: mod_base = OTHER; note = 2-deoxy-2-fluoro ribonucleotide
  modified_base 14: mod_base = OTHER; note = 2-deoxy-2-fluoro ribonucleotide
  modified_base 16: mod_base = OTHER; note = 2-deoxy-2-fluoro ribonucleotide
  modified_base 5..6: mod_base = OTHER; note = phosphorothioate internucleotide linkage
  modified_base 6..7: mod_base = OTHER; note = phosphorothioate internucleotide linkage
tatatcagccccttattgttatacga

SEQ ID NO: 1094 - RNA, 26 nt, synthetic construct
  source 1..26: mol_type = other RNA
  modified_base 1: mod_base = OTHER; note = 2'-OMe modified nucleotide
  modified_base 3: mod_base = OTHER; note = 2'-OMe modified nucleotide
  modified_base 5..14: mod_base = OTHER; note = 2'-OMe modified nucleotide
  modified_base 17: mod_base = OTHER; note = 2'-OMe modified nucleotide
  modified_base 19..26: mod_base = OTHER; note = 2'-OMe modified nucleotide
  modified_base 15..16: mod_base = OTHER; note = 2-deoxy-2-fluoro ribonucleotide
  modified_base 18: mod_base = OTHER; note = 2-deoxy-2-fluoro ribonucleotide
  modified_base 5..6: mod_base = OTHER; note = phosphorothioate internucleotide linkage
  modified_base 6..7: mod_base = OTHER; note = phosphorothioate internucleotide linkage
tatatcagccccttattgttatacga

SEQ ID NO: 1095 - RNA, 26 nt, synthetic construct
  source 1..26: mol_type = other RNA
  modified_base 1: mod_base = OTHER; note = 2'-OMe modified nucleotide
  modified_base 3: mod_base = OTHER; note = 2'-OMe modified nucleotide
  modified_base 5..13: mod_base = OTHER; note = 2'-OMe modified nucleotide
  modified_base 17..26: mod_base = OTHER; note = 2'-OMe modified nucleotide
  modified_base 14..16: mod_base = OTHER; note = 2-deoxy-2-fluoro ribonucleotide
  modified_base 5..6: mod_base = OTHER; note = phosphorothioate internucleotide linkage
  modified_base 6..7: mod_base = OTHER; note = phosphorothioate internucleotide linkage
tatatcagccccttattgttatacga

SEQ ID NO: 1096 - RNA, 26 nt, synthetic construct
  source 1..26: mol_type = other RNA
  modified_base 1: mod_base = OTHER; note = 2'-OMe modified nucleotide
  modified_base 3: mod_base = OTHER; note = 2'-OMe modified nucleotide
  modified_base 5: mod_base = OTHER; note = 2'-OMe modified nucleotide
  modified_base 7: mod_base = OTHER; note = 2'-OMe modified nucleotide
  modified_base 9: mod_base = OTHER; note = 2'-OMe modified nucleotide
  modified_base 11: mod_base = OTHER; note = 2'-OMe modified nucleotide
  modified_base 13: mod_base = OTHER; note = 2'-OMe modified nucleotide
  modified_base 17: mod_base = OTHER; note = 2'-OMe modified nucleotide
  modified_base 19: mod_base = OTHER; note = 2'-OMe modified nucleotide
  modified_base 21: mod_base = OTHER; note = 2'-OMe modified nucleotide
  modified_base 23: mod_base = OTHER; note = 2'-OMe modified nucleotide
  modified_base 25: mod_base = OTHER; note = 2'-OMe modified nucleotide
  modified_base 6: mod_base = OTHER; note = 2-deoxy-2-fluoro ribonucleotide
  modified_base 8: mod_base = OTHER; note = 2-deoxy-2-fluoro ribonucleotide
  modified_base 10: mod_base = OTHER; note = 2-deoxy-2-fluoro ribonucleotide
  modified_base 12: mod_base = OTHER; note = 2-deoxy-2-fluoro ribonucleotide
  modified_base 14..16: mod_base = OTHER; note = 2-deoxy-2-fluoro ribonucleotide
  modified_base 18: mod_base = OTHER; note = 2-deoxy-2-fluoro ribonucleotide
  modified_base 20: mod_base = OTHER; note = 2-deoxy-2-fluoro ribonucleotide
  modified_base 22: mod_base = OTHER; note = 2-deoxy-2-fluoro ribonucleotide
  modified_base 24: mod_base = OTHER; note = 2-deoxy-2-fluoro ribonucleotide
  modified_base 26: mod_base = OTHER; note = 2-deoxy-2-fluoro ribonucleotide
  modified_base 5..6: mod_base = OTHER; note = phosphorothioate internucleotide linkage
  modified_base 6..7: mod_base = OTHER; note = phosphorothioate internucleotide linkage
tatatagttatcgaggctcattctca

SEQ ID NO: 1097 - RNA, 26 nt, synthetic construct
  source 1..26: mol_type = other RNA
  modified_base 1: mod_base = OTHER; note = 2'-OMe modified nucleotide
  modified_base 3: mod_base = OTHER; note = 2'-OMe modified nucleotide
  modified_base 5..13: mod_base = OTHER; note = 2'-OMe modified nucleotide
  modified_base 17..26: mod_base = OTHER; note = 2'-OMe modified nucleotide
  modified_base 14..16: mod_base = OTHER; note = 2-deoxy-2-fluoro ribonucleotide
  modified_base 5..6: mod_base = OTHER; note = phosphorothioate internucleotide linkage
  modified_base 6..7: mod_base = OTHER; note = phosphorothioate internucleotide linkage
tatatagttatcgaggctcattctca

SEQ ID NO: 1098 - RNA, 26 nt, synthetic construct
  source 1..26: mol_type = other RNA
  modified_base 1: mod_base = OTHER; note = 2'-OMe modified nucleotide
  modified_base 3: mod_base = OTHER; note = 2'-OMe modified nucleotide
  modified_base 5..7: mod_base = OTHER; note = 2'-OMe modified nucleotide
  modified_base 9: mod_base = OTHER; note = 2'-OMe modified nucleotide
  modified_base 11: mod_base = OTHER; note = 2'-OMe modified nucleotide
  modified_base 13: mod_base = OTHER; note = 2'-OMe modified nucleotide
  modified_base 17: mod_base = OTHER; note = 2'-OMe modified nucleotide
  modified_base 19: mod_base = OTHER; note = 2'-OMe modified nucleotide
  modified_base 21: mod_base = OTHER; note = 2'-OMe modified nucleotide
  modified_base 23: mod_base = OTHER; note = 2'-OMe modified nucleotide
  modified_base 25..26: mod_base = OTHER; note = 2'-OMe modified nucleotide
  modified_base 8: mod_base = OTHER; note = 2-deoxy-2-fluoro ribonucleotide
  modified_base 10: mod_base = OTHER; note = 2-deoxy-2-fluoro ribonucleotide
  modified_base 12: mod_base = OTHER; note = 2-deoxy-2-fluoro ribonucleotide
  modified_base 14..16: mod_base = OTHER; note = 2-deoxy-2-fluoro ribonucleotide
  modified_base 18: mod_base = OTHER; note = 2-deoxy-2-fluoro ribonucleotide
  modified_base 20: mod_base = OTHER; note = 2-deoxy-2-fluoro ribonucleotide
  modified_base 22: mod_base = OTHER; note = 2-deoxy-2-fluoro ribonucleotide
  modified_base 24: mod_base = OTHER; note = 2-deoxy-2-fluoro ribonucleotide
  modified_base 5..6: mod_base = OTHER; note = phosphorothioate internucleotide linkage
  modified_base 6..7: mod_base = OTHER; note = phosphorothioate internucleotide linkage
tatatcagccccttattgttatacga

SEQ ID NO: 1099 - RNA, 26 nt, synthetic construct
  source 1..26: mol_type = other RNA
  modified_base 1: mod_base = OTHER; note = 2'-OMe modified nucleotide
  modified_base 3: mod_base = OTHER; note = 2'-OMe modified nucleotide
  modified_base 5..13: mod_base = OTHER; note = 2'-OMe modified nucleotide
  modified_base 17..26: mod_base = OTHER; note = 2'-OMe modified nucleotide
  modified_base 14..16: mod_base = OTHER; note = 2-deoxy-2-fluoro ribonucleotide
  modified_base 5..6: mod_base = OTHER; note = phosphorothioate internucleotide linkage
  modified_base 6..7: mod_base = OTHER; note = phosphorothioate internucleotide linkage
tatatcagcgccttattgttatacga

SEQ ID NO: 1100 - RNA, 26 nt, synthetic construct
  source 1..26: mol_type = other RNA
  modified_base 1: mod_base = OTHER; note = 2'-OMe modified nucleotide
  modified_base 3: mod_base = OTHER; note = 2'-OMe modified nucleotide
  modified_base 5..7: mod_base = OTHER; note = 2'-OMe modified nucleotide
  modified_base 9: mod_base = OTHER; note = 2'-OMe modified nucleotide
  modified_base 11: mod_base = OTHER; note = 2'-OMe modified nucleotide
  modified_base 13: mod_base = OTHER; note = 2'-OMe modified nucleotide
  modified_base 17: mod_base = OTHER; note = 2'-OMe modified nucleotide
  modified_base 19: mod_base = OTHER; note = 2'-OMe modified nucleotide
  modified_base 21: mod_base = OTHER; note = 2'-OMe modified nucleotide
  modified_base 23: mod_base = OTHER; note = 2'-OMe modified nucleotide
  modified_base 25..26: mod_base = OTHER; note = 2'-OMe modified nucleotide
  modified_base 8: mod_base = OTHER; note = 2-deoxy-2-fluoro ribonucleotide
  modified_base 10: mod_base = OTHER; note = 2-deoxy-2-fluoro ribonucleotide
  modified_base 12: mod_base = OTHER; note = 2-deoxy-2-fluoro ribonucleotide
  modified_base 14..16: mod_base = OTHER; note = 2-deoxy-2-fluoro ribonucleotide
  modified_base 18: mod_base = OTHER; note = 2-deoxy-2-fluoro ribonucleotide
  modified_base 20: mod_base = OTHER; note = 2-deoxy-2-fluoro ribonucleotide
  modified_base 22: mod_base = OTHER; note = 2-deoxy-2-fluoro ribonucleotide
  modified_base 24: mod_base = OTHER; note = 2-deoxy-2-fluoro ribonucleotide
  modified_base 5..6: mod_base = OTHER; note = phosphorothioate internucleotide linkage
  modified_base 6..7: mod_base = OTHER; note = phosphorothioate internucleotide linkage
tatatcagccccttattgttatacga

SEQ ID NO: 1101 - RNA, 17 nt, synthetic construct
  source 1..17: mol_type = other RNA
  modified_base 1..4: mod_base = OTHER; note = 2'-OMe modified nucleotide
  modified_base 8..17: mod_base = OTHER; note = 2'-OMe modified nucleotide
  modified_base 5..7: mod_base = OTHER; note = 2-deoxy-2-fluoro ribonucleotide
  modified_base 1..2: mod_base = OTHER; note = phosphorothioate internucleotide linkage
  modified_base 2..3: mod_base = OTHER; note = phosphorothioate internucleotide linkage
ccccttattgttataca

SEQ ID NO: 1102 - RNA, 17 nt, synthetic construct
  source 1..17: mol_type = other RNA
  modified_base 16..17: mod_base = OTHER; note = 2'-methoxyethyl nucleotide
  modified_base 1..4: mod_base = OTHER; note = 2'-OMe modified nucleotide
  modified_base 8..15: mod_base = OTHER; note = 2'-OMe modified nucleotide
  modified_base 5..7: mod_base = OTHER; note = 2-deoxy-2-fluoro ribonucleotide
  modified_base 1..2: mod_base = OTHER; note = phosphorothioate internucleotide linkage
  modified_base 2..3: mod_base = OTHER; note = phosphorothioate internucleotide linkage
ccccttattgttataca

SEQ ID NO: 1103 - RNA, 17 nt, synthetic construct
  source 1..17: mol_type = other RNA
  modified_base 1..2: mod_base = OTHER; note = 2'-methoxyethyl nucleotide
  modified_base 16..17: mod_base = OTHER; note = 2'-methoxyethyl nucleotide
  modified_base 3..4: mod_base = OTHER; note = 2'-OMe modified nucleotide
  modified_base 8..15: mod_base = OTHER; note = 2'-OMe modified nucleotide
  modified_base 5..7: mod_base = OTHER; note = 2-deoxy-2-fluoro ribonucleotide
  modified_base 1..2: mod_base = OTHER; note = phosphorothioate internucleotide linkage
  modified_base 2..3: mod_base = OTHER; note = phosphorothioate internucleotide linkage
ccccttattgttataca

SEQ ID NO: 1104 - RNA, 17 nt, synthetic construct
  source 1..17: mol_type = other RNA
  modified_base 1..4: mod_base = OTHER; note = 2'-OMe modified nucleotide
  modified_base 8..17: mod_base = OTHER; note = 2'-OMe modified nucleotide
  modified_base 5..7: mod_base = OTHER; note = 2-deoxy-2-fluoro ribonucleotide
  modified_base 1..2: mod_base = OTHER; note = phosphorothioate internucleotide linkage
  modified_base 2..3: mod_base = OTHER; note = phosphorothioate internucleotide linkage
cccttattgttatacga

SEQ ID NO: 1105 - RNA, 17 nt, synthetic construct
  source 1..17: mol_type = other RNA
  modified_base 16..17: mod_base = OTHER; note = 2'-methoxyethyl nucleotide
  modified_base 1..4: mod_base = OTHER; note = 2'-OMe modified nucleotide
  modified_base 8..15: mod_base = OTHER; note = 2'-OMe modified nucleotide
  modified_base 5..7: mod_base = OTHER; note = 2-deoxy-2-fluoro ribonucleotide
  modified_base 1..2: mod_base = OTHER; note = phosphorothioate internucleotide linkage
  modified_base 2..3: mod_base = OTHER; note = phosphorothioate internucleotide linkage
cccttattgttatacga

SEQ ID NO: 1106 - RNA, 17 nt, synthetic construct
  source 1..17: mol_type = other RNA
  modified_base 1..2: mod_base = OTHER; note = 2'-methoxyethyl nucleotide
  modified_base 16..17: mod_base = OTHER; note = 2'-methoxyethyl nucleotide
  modified_base 3..4: mod_base = OTHER; note = 2'-OMe modified nucleotide
  modified_base 8..15: mod_base = OTHER; note = 2'-OMe modified nucleotide
  modified_base 5..7: mod_base = OTHER; note = 2-deoxy-2-fluoro ribonucleotide
  modified_base 1..2: mod_base = OTHER; note = phosphorothioate internucleotide linkage
  modified_base 2..3: mod_base = OTHER; note = phosphorothioate internucleotide linkage
cccttattgttatacga

SEQ ID NO: 1107 - RNA, 17 nt, synthetic construct
  source 1..17: mol_type = other RNA
  modified_base 1..4: mod_base = OTHER; note = 2'-OMe modified nucleotide
  modified_base 8..17: mod_base = OTHER; note = 2'-OMe modified nucleotide
  modified_base 5..7: mod_base = OTHER; note = 2-deoxy-2-fluoro ribonucleotide
  modified_base 1..2: mod_base = OTHER; note = phosphorothioate internucleotide linkage
  modified_base 2..3: mod_base = OTHER; note = phosphorothioate internucleotide linkage
atcgaggctcattctca

SEQ ID NO: 1108 - RNA, 17 nt, synthetic construct
  source 1..17: mol_type = other RNA
  modified_base 16..17: mod_base = OTHER; note = 2'-methoxyethyl nucleotide
  modified_base 1..4: mod_base = OTHER; note = 2'-OMe modified nucleotide
  modified_base 8..15: mod_base = OTHER; note = 2'-OMe modified nucleotide
  modified_base 5..7: mod_base = OTHER; note = 2-deoxy-2-fluoro ribonucleotide
  modified_base 1..2: mod_base = OTHER; note = phosphorothioate internucleotide linkage
  modified_base 2..3: mod_base = OTHER; note = phosphorothioate internucleotide linkage
atcgaggctcattctca

SEQ ID NO: 1109 - RNA, 17 nt, synthetic construct
  source 1..17: mol_type = other RNA
  modified_base 1..2: mod_base = OTHER; note = 2'-methoxyethyl nucleotide
  modified_base 16..17: mod_base = OTHER; note = 2'-methoxyethyl nucleotide
  modified_base 3..4: mod_base = OTHER; note = 2'-OMe modified nucleotide
  modified_base 8..15: mod_base = OTHER; note = 2'-OMe modified nucleotide
  modified_base 5..7: mod_base = OTHER; note = 2-deoxy-2-fluoro ribonucleotide
  modified_base 1..2: mod_base = OTHER; note = phosphorothioate internucleotide linkage
  modified_base 2..3: mod_base = OTHER; note = phosphorothioate internucleotide linkage
  modified_base 2: mod_base = OTHER; note = Thymine
atcgaggctcattctca

SEQ ID NO: 1110 - RNA, 17 nt, synthetic construct
  source 1..17: mol_type = other RNA
  modified_base 1..4: mod_base = OTHER; note = 2'-OMe modified nucleotide
  modified_base 8..17: mod_base = OTHER; note = 2'-OMe modified nucleotide
  modified_base 5..7: mod_base = OTHER; note = 2-deoxy-2-fluoro ribonucleotide
  modified_base 1..2: mod_base = OTHER; note = phosphorothioate internucleotide linkage
  modified_base 2..3: mod_base = OTHER; note = phosphorothioate internucleotide linkage
aacagaatcaggtgtca

SEQ ID NO: 1111 - RNA, 17 nt, synthetic construct
  source 1..17: mol_type = other RNA
  modified_base 16..17: mod_base = OTHER; note = 2'-methoxyethyl nucleotide
  modified_base 1..4: mod_base = OTHER; note = 2'-OMe modified nucleotide
  modified_base 8..15: mod_base = OTHER; note = 2'-OMe modified nucleotide
  modified_base 5..7: mod_base = OTHER; note = 2-deoxy-2-fluoro ribonucleotide
  modified_base 1..2: mod_base = OTHER; note = phosphorothioate internucleotide linkage
  modified_base 2..3: mod_base = OTHER; note = phosphorothioate internucleotide linkage
aacagaatcaggtgtca

SEQ ID NO: 1112 - RNA, 17 nt, synthetic construct
  source 1..17: mol_type = other RNA
  modified_base 1..2: mod_base = OTHER; note = 2'-methoxyethyl nucleotide
  modified_base 16..17: mod_base = OTHER; note = 2'-methoxyethyl nucleotide
  modified_base 3..4: mod_base = OTHER; note = 2'-OMe modified nucleotide
  modified_base 8..15: mod_base = OTHER; note = 2'-OMe modified nucleotide
  modified_base 5..7: mod_base = OTHER; note = 2-deoxy-2-fluoro ribonucleotide
  modified_base 1..2: mod_base = OTHER; note = phosphorothioate internucleotide linkage
  modified_base 2..3: mod_base = OTHER; note = phosphorothioate internucleotide linkage
aacagaatcaggtgtca

SEQ ID NO: 1113 - RNA, 26 nt, synthetic construct
  source 1..26: mol_type = other RNA
  modified_base 26: mod_base = OTHER; note = inverted deoxyribonucleotide
  modified_base 1..13: mod_base = OTHER; note = 2'-OMe modified nucleotide
  modified_base 17..25: mod_base = OTHER; note = 2'-OMe modified nucleotide
  modified_base 14..16: mod_base = OTHER; note = 2-deoxy-2-fluoro ribonucleotide
  modified_base 5..6: mod_base = OTHER; note = phosphorothioate internucleotide linkage
  modified_base 6..7: mod_base = OTHER; note = phosphorothioate internucleotide linkage
tatatagttatcgaggctcattctca

SEQ ID NO: 1114 - RNA, 26 nt, synthetic construct
  source 1..26: mol_type = other RNA
  modified_base 26: mod_base = OTHER; note = inverted deoxyribonucleotide
  modified_base 1..7: mod_base = OTHER; note = 2'-OMe modified nucleotide
  modified_base 9: mod_base = OTHER; note = 2'-OMe modified nucleotide
  modified_base 11: mod_base = OTHER; note = 2'-OMe modified nucleotide
  modified_base 13: mod_base = OTHER; note = 2'-OMe modified nucleotide
  modified_base 17: mod_base = OTHER; note = 2'-OMe modified nucleotide
  modified_base 19: mod_base = OTHER; note = 2'-OMe modified nucleotide
  modified_base 21: mod_base = OTHER; note = 2'-OMe modified nucleotide
  modified_base 23: mod_base = OTHER; note = 2'-OMe modified nucleotide
  modified_base 25: mod_base = OTHER; note = 2'-OMe modified nucleotide
  modified_base 8: mod_base = OTHER; note = 2-deoxy-2-fluoro ribonucleotide
  modified_base 10: mod_base = OTHER; note = 2-deoxy-2-fluoro ribonucleotide
  modified_base 12: mod_base = OTHER; note = 2-deoxy-2-fluoro ribonucleotide
  modified_base 14..16: mod_base = OTHER; note = 2-deoxy-2-fluoro ribonucleotide
  modified_base 18: mod_base = OTHER; note = 2-deoxy-2-fluoro ribonucleotide
  modified_base 20: mod_base = OTHER; note = 2-deoxy-2-fluoro ribonucleotide
  modified_base 22: mod_base = OTHER; note = 2-deoxy-2-fluoro ribonucleotide
  modified_base 24: mod_base = OTHER; note = 2-deoxy-2-fluoro ribonucleotide
  modified_base 5..6: mod_base = OTHER; note = phosphorothioate internucleotide linkage
  modified_base 6..7: mod_base = OTHER; note = phosphorothioate internucleotide linkage
tatatcagccccttattgttatacga

SEQ ID NO: 1115 - RNA, 24 nt, synthetic construct
  source 1..24: mol_type = other RNA
  modified_base 1..3: mod_base = OTHER; note = 2'-OMe modified nucleotide
  modified_base 5: mod_base = OTHER; note = 2'-OMe modified nucleotide
  modified_base 7: mod_base = OTHER; note = 2'-OMe modified nucleotide
  modified_base 9: mod_base = OTHER; note = 2'-OMe modified nucleotide
  modified_base 13: mod_base = OTHER; note = 2'-OMe modified nucleotide
  modified_base 15: mod_base = OTHER; note = 2'-OMe modified nucleotide
  modified_base 17: mod_base = OTHER; note = 2'-OMe modified nucleotide
  modified_base 19: mod_base = OTHER; note = 2'-OMe modified nucleotide
  modified_base 21..24: mod_base = OTHER; note = 2'-OMe modified nucleotide
  modified_base 4: mod_base = OTHER; note = 2-deoxy-2-fluoro ribonucleotide
  modified_base 6: mod_base = OTHER; note = 2-deoxy-2-fluoro ribonucleotide
  modified_base 8: mod_base = OTHER; note = 2-deoxy-2-fluoro ribonucleotide
  modified_base 10..12: mod_base = OTHER; note = 2-deoxy-2-fluoro ribonucleotide
  modified_base 14: mod_base = OTHER; note = 2-deoxy-2-fluoro ribonucleotide
  modified_base 16: mod_base = OTHER; note = 2-deoxy-2-fluoro ribonucleotide
  modified_base 18: mod_base = OTHER; note = 2-deoxy-2-fluoro ribonucleotide
  modified_base 20: mod_base = OTHER; note = 2-deoxy-2-fluoro ribonucleotide
  modified_base 1..2: mod_base = OTHER; note = phosphorothioate internucleotide linkage
  modified_base 23..24: mod_base = OTHER; note = phosphorothioate internucleotide linkage
tcagccccttattgttatacgatt

SEQ ID NO: 1116 - RNA, 22 nt, synthetic construct
  source 1..22: mol_type = other RNA
  modified_base 1..3: mod_base = OTHER; note = 2'-OMe modified nucleotide
  modified_base 5: mod_base = OTHER; note = 2'-OMe modified nucleotide
  modified_base 7: mod_base = OTHER; note = 2'-OMe modified nucleotide
  modified_base 9: mod_base = OTHER; note = 2'-OMe modified nucleotide
  modified_base 13: mod_base = OTHER; note = 2'-OMe modified nucleotide
  modified_base 15: mod_base = OTHER; note = 2'-OMe modified nucleotide
  modified_base 17: mod_base = OTHER; note = 2'-OMe modified nucleotide
  modified_base 19: mod_base = OTHER; note = 2'-OMe modified nucleotide
  modified_base 21..22: mod_base = OTHER; note = 2'-OMe modified nucleotide
  modified_base 4: mod_base = OTHER; note = 2-deoxy-2-fluoro ribonucleotide
  modified_base 6: mod_base = OTHER; note = 2-deoxy-2-fluoro ribonucleotide
  modified_base 8: mod_base = OTHER; note = 2-deoxy-2-fluoro ribonucleotide
  modified_base 10..12: mod_base = OTHER; note = 2-deoxy-2-fluoro ribonucleotide
  modified_base 14: mod_base = OTHER; note = 2-deoxy-2-fluoro ribonucleotide
  modified_base 16: mod_base = OTHER; note = 2-deoxy-2-fluoro ribonucleotide
  modified_base 18: mod_base = OTHER; note = 2-deoxy-2-fluoro ribonucleotide
  modified_base 20: mod_base = OTHER; note = 2-deoxy-2-fluoro ribonucleotide
  modified_base 1..2: mod_base = OTHER; note = phosphorothioate internucleotide linkage
  modified_base 21..22: mod_base = OTHER; note = phosphorothioate internucleotide linkage
tcagccccttattgttatacga

SEQ ID NO: 1117 - RNA, 24 nt, synthetic construct
  source 1..24: mol_type = other RNA
  modified_base 1..3: mod_base = OTHER; note = 2'-OMe modified nucleotide
  modified_base 5: mod_base = OTHER; note = 2'-OMe modified nucleotide
  modified_base 7: mod_base = OTHER; note = 2'-OMe modified nucleotide
  modified_base 9: mod_base = OTHER; note = 2'-OMe modified nucleotide
  modified_base 13: mod_base = OTHER; note = 2'-OMe modified nucleotide
  modified_base 15: mod_base = OTHER; note = 2'-OMe modified nucleotide
  modified_base 17: mod_base = OTHER; note = 2'-OMe modified nucleotide
  modified_base 19: mod_base = OTHER; note = 2'-OMe modified nucleotide
  modified_base 21..24: mod_base = OTHER; note = 2'-OMe modified nucleotide
  modified_base 4: mod_base = OTHER; note = 2-deoxy-2-fluoro ribonucleotide
  modified_base 6: mod_base = OTHER; note = 2-deoxy-2-fluoro ribonucleotide
  modified_base 8: mod_base = OTHER; note = 2-deoxy-2-fluoro ribonucleotide
  modified_base 10..12: mod_base = OTHER; note = 2-deoxy-2-fluoro ribonucleotide
  modified_base 14: mod_base = OTHER; note = 2-deoxy-2-fluoro ribonucleotide
  modified_base 16: mod_base = OTHER; note = 2-deoxy-2-fluoro ribonucleotide
  modified_base 18: mod_base = OTHER; note = 2-deoxy-2-fluoro ribonucleotide
  modified_base 20: mod_base = OTHER; note = 2-deoxy-2-fluoro ribonucleotide
  modified_base 1..2: mod_base = OTHER; note = phosphorothioate internucleotide linkage
  modified_base 23..24: mod_base = OTHER; note = phosphorothioate internucleotide linkage
tcagccccttattgttatacgatt

SEQ ID NO: 1118 - RNA, 24 nt, synthetic construct
  source 1..24: mol_type = other RNA
  modified_base 1..9: mod_base = OTHER; note = 2'-OMe modified nucleotide
  modified_base 13..24: mod_base = OTHER; note = 2'-OMe modified nucleotide
  modified_base 10..12: mod_base = OTHER; note = 2-deoxy-2-fluoro ribonucleotide
  modified_base 1..2: mod_base = OTHER; note = phosphorothioate internucleotide linkage
  modified_base 23..24: mod_base = OTHER; note = phosphorothioate internucleotide linkage
tagttatcgaggctcattctcatt

SEQ ID NO: 1119 - RNA, 26 nt, synthetic construct
  source 1..26: mol_type = other RNA
  modified_base 1: mod_base = OTHER; note = 2'-OMe modified nucleotide
  modified_base 3: mod_base = OTHER; note = 2'-OMe modified nucleotide
  modified_base 5..11: mod_base = OTHER; note = 2'-OMe modified nucleotide
  modified_base 13: mod_base = OTHER; note = 2'-OMe modified nucleotide
  modified_base 17..26: mod_base = OTHER; note = 2'-OMe modified nucleotide
  modified_base 12: mod_base = OTHER; note = 2-deoxy-2-fluoro ribonucleotide
  modified_base 14..16: mod_base = OTHER; note = 2-deoxy-2-fluoro ribonucleotide
  modified_base 5..6: mod_base = OTHER; note = phosphorothioate internucleotide linkage
  modified_base 6..7: mod_base = OTHER; note = phosphorothioate internucleotide linkage
tatatcagccccttattgttatacga

SEQ ID NO: 1120 - RNA, 26 nt, synthetic construct
  source 1..26: mol_type = other RNA
  modified_base 1: mod_base = OTHER; note = 2'-OMe modified nucleotide
  modified_base 3: mod_base = OTHER; note = 2'-OMe modified nucleotide
  modified_base 5..11: mod_base = OTHER; note = 2'-OMe modified nucleotide
  modified_base 13: mod_base = OTHER; note = 2'-OMe modified nucleotide
  modified_base 17..26: mod_base = OTHER; note = 2'-OMe modified nucleotide
  modified_base 12: mod_base = OTHER; note = 2-deoxy-2-fluoro ribonucleotide
  modified_base 14..16: mod_base = OTHER; note = 2-deoxy-2-fluoro ribonucleotide
  modified_base 5..6: mod_base = OTHER; note = phosphorothioate internucleotide linkage
  modified_base 6..7: mod_base = OTHER; note = phosphorothioate internucleotide linkage
tatatagttatcgaggctcattctca

SEQ ID NO: 1121 - RNA, 26 nt, synthetic construct
  source 1..26: mol_type = other RNA
  modified_base 26: mod_base = OTHER; note = inverted deoxyribonucleotide
  modified_base 1..7: mod_base = OTHER; note = 2'-OMe modified nucleotide
  modified_base 9: mod_base = OTHER; note = 2'-OMe modified nucleotide
  modified_base 11: mod_base = OTHER; note = 2'-OMe modified nucleotide
  modified_base 13: mod_base = OTHER; note = 2'-OMe modified nucleotide
  modified_base 17: mod_base = OTHER; note = 2'-OMe modified nucleotide
  modified_base 19: mod_base = OTHER; note = 2'-OMe modified nucleotide
  modified_base 21: mod_base = OTHER; note = 2'-OMe modified nucleotide
  modified_base 23: mod_base = OTHER; note = 2'-OMe modified nucleotide
  modified_base 25: mod_base = OTHER; note = 2'-OMe modified nucleotide
  modified_base 8: mod_base = OTHER; note = 2-deoxy-2-fluoro ribonucleotide
  modified_base 10: mod_base = OTHER; note = 2-deoxy-2-fluoro ribonucleotide
  modified_base 12: mod_base = OTHER; note = 2-deoxy-2-fluoro ribonucleotide
  modified_base 14..16: mod_base = OTHER; note = 2-deoxy-2-fluoro ribonucleotide
  modified_base 18: mod_base = OTHER; note = 2-deoxy-2-fluoro ribonucleotide
  modified_base 20: mod_base = OTHER; note = 2-deoxy-2-fluoro ribonucleotide
  modified_base 22: mod_base = OTHER; note = 2-deoxy-2-fluoro ribonucleotide
  modified_base 24: mod_base = OTHER; note = 2-deoxy-2-fluoro ribonucleotide
  modified_base 5..6: mod_base = OTHER; note = phosphorothioate internucleotide linkage
  modified_base 25..26: mod_base = OTHER; note = phosphorothioate internucleotide linkage
tatatcagccccttattgttatacga

SEQ ID NO: 1122 - RNA, 21 nt, synthetic construct
  source 1..21: mol_type = other RNA
  modified_base 2: mod_base = OTHER; note = 2'-OMe modified nucleotide
  modified_base 4: mod_base = OTHER; note = 2'-OMe modified nucleotide
  modified_base 6: mod_base = OTHER; note = 2'-OMe modified nucleotide
  modified_base 10: mod_base = OTHER; note = 2'-OMe modified nucleotide
  modified_base 12: mod_base = OTHER; note = 2'-OMe modified nucleotide
  modified_base 14: mod_base = OTHER; note = 2'-OMe modified nucleotide
  modified_base 16: mod_base = OTHER; note = 2'-OMe modified nucleotide
  modified_base 18..21: mod_base = OTHER; note = 2'-OMe modified nucleotide
  modified_base 1: mod_base = OTHER; note = 2-deoxy-2-fluoro ribonucleotide
  modified_base 3: mod_base = OTHER; note = 2-deoxy-2-fluoro ribonucleotide
  modified_base 5: mod_base = OTHER; note = 2-deoxy-2-fluoro ribonucleotide
  modified_base 7..9: mod_base = OTHER; note = 2-deoxy-2-fluoro ribonucleotide
  modified_base 11: mod_base = OTHER; note = 2-deoxy-2-fluoro ribonucleotide
  modified_base 13: mod_base = OTHER; note = 2-deoxy-2-fluoro ribonucleotide
  modified_base 15: mod_base = OTHER; note = 2-deoxy-2-fluoro ribonucleotide
  modified_base 17: mod_base = OTHER; note = 2-deoxy-2-fluoro ribonucleotide
  modified_base 20..21: mod_base = OTHER; note = phosphorothioate internucleotide linkage
gccccttattgttatacgatt

SEQ ID NO: 1123 - RNA, 26 nt, synthetic construct
  source 1..26: mol_type = other RNA
  modified_base 26: mod_base = OTHER; note = inverted deoxyribonucleotide
  modified_base 1..13: mod_base = OTHER; note = 2'-OMe modified nucleotide
  modified_base 17..25: mod_base = OTHER; note = 2'-OMe modified nucleotide
  modified_base 14..16: mod_base = OTHER; note = 2-deoxy-2-fluoro ribonucleotide
  modified_base 5..6: mod_base = OTHER; note = phosphorothioate internucleotide linkage
  modified_base 6..7: mod_base = OTHER; note = phosphorothioate internucleotide linkage
tatatagttatcgaggctcattctca

SEQ ID NO: 1124 - RNA, 26 nt, synthetic construct
  source 1..26: mol_type = other RNA
  modified_base 26: mod_base = OTHER; note = inverted deoxyribonucleotide
  modified_base 25: mod_base = OTHER; note = 2'-methoxyethyl nucleotide
  modified_base 1..13: mod_base = OTHER; note = 2'-OMe modified nucleotide
  modified_base 17..24: mod_base = OTHER; note = 2'-OMe modified nucleotide
  modified_base 14..16: mod_base = OTHER; note = 2-deoxy-2-fluoro ribonucleotide
  modified_base 5..6: mod_base = OTHER; note = phosphorothioate internucleotide linkage
  modified_base 6..7: mod_base = OTHER; note = phosphorothioate internucleotide linkage
tatatagttatcgaggctcattctca

SEQ ID NO: 1125 - RNA, 26 nt, synthetic construct
  source 1..26: mol_type = other RNA
  modified_base 26: mod_base = OTHER; note = inverted deoxyribonucleotide
  modified_base 25: mod_base = OTHER; note = 2'-methoxyethyl nucleotide
  modified_base 1..13: mod_base = OTHER; note = 2'-OMe modified nucleotide
  modified_base 17..24: mod_base = OTHER; note = 2'-OMe modified nucleotide
  modified_base 14..16: mod_base = OTHER; note = 2-deoxy-2-fluoro ribonucleotide
  modified_base 5..6: mod_base = OTHER; note = phosphorothioate internucleotide linkage
  modified_base 6..7: mod_base = OTHER; note = phosphorothioate internucleotide linkage
tatatagttatcgaggctcattctca

SEQ ID NO: 1126 - RNA, 26 nt, synthetic construct
  source 1..26: mol_type = other RNA
  modified_base 26: mod_base = OTHER; note = inverted deoxyribonucleotide
  modified_base 25: mod_base = OTHER; note = 2'-methoxyethyl nucleotide
  modified_base 1..13: mod_base = OTHER; note = 2'-OMe modified nucleotide
  modified_base 17..24: mod_base = OTHER; note = 2'-OMe modified nucleotide
  modified_base 14..16: mod_base = OTHER; note = 2-deoxy-2-fluoro ribonucleotide
  modified_base 5..6: mod_base = OTHER; note = phosphorothioate internucleotide linkage
  modified_base 6..7: mod_base = OTHER; note = phosphorothioate internucleotide linkage
tatatagttatcgaggctcattctca

SEQ ID NO: 1127 - RNA, 26 nt, synthetic construct
  source 1..26: mol_type = other RNA
  modified_base 26: mod_base = OTHER; note = inverted deoxyribonucleotide
  modified_base 25: mod_base = OTHER; note = 2'-methoxyethyl nucleotide
  modified_base 1..13: mod_base = OTHER; note = 2'-OMe modified nucleotide
  modified_base 17..24: mod_base = OTHER; note = 2'-OMe modified nucleotide
  modified_base 14..16: mod_base = OTHER; note = 2-deoxy-2-fluoro ribonucleotide
  modified_base 5..6: mod_base = OTHER; note = phosphorothioate internucleotide linkage
  modified_base 6..7: mod_base = OTHER; note = phosphorothioate internucleotide linkage
tatatagttatcgaggctcattctca

SEQ ID NO: 1128 - RNA, 26 nt, synthetic construct
  source 1..26: mol_type = other RNA
  modified_base 26: mod_base = OTHER; note = inverted deoxyribonucleotide
  modified_base 1..12: mod_base = OTHER; note = 2'-OMe modified nucleotide
  modified_base 16..25: mod_base = OTHER; note = 2'-OMe modified nucleotide
  modified_base 13..15: mod_base = OTHER; note = 2-deoxy-2-fluoro ribonucleotide
  modified_base 4..5: mod_base = OTHER; note = phosphorothioate internucleotide linkage
  modified_base 5..6: mod_base = OTHER; note = phosphorothioate internucleotide linkage
  modified_base 26: mod_base = OTHER; note = Thymine
atatcagccccttattgttatacgat

SEQ ID NO: 1129 - RNA, 26 nt, synthetic construct
  source 1..26: mol_type = other RNA
  modified_base 26: mod_base = OTHER; note = inverted deoxyribonucleotide
  modified_base 1..11: mod_base = OTHER; note = 2'-OMe modified nucleotide
  modified_base 15..25: mod_base = OTHER; note = 2'-OMe modified nucleotide
  modified_base 12..14: mod_base = OTHER; note = 2-deoxy-2-fluoro ribonucleotide
  modified_base 3..4: mod_base = OTHER; note = phosphorothioate internucleotide linkage
  modified_base 4..5: mod_base = OTHER; note = phosphorothioate internucleotide linkage
  modified_base 26: mod_base = OTHER; note = Thymine
tatcagccccttattgttatacgatt

SEQ ID NO: 1130 - RNA, 26 nt, synthetic construct
  source 1..26: mol_type = other RNA
  modified_base 26: mod_base = OTHER; note = inverted deoxyribonucleotide
  modified_base 1..12: mod_base = OTHER; note = 2'-OMe modified nucleotide
  modified_base 16..25: mod_base = OTHER; note = 2'-OMe modified nucleotide
  modified_base 13..15: mod_base = OTHER; note = 2-deoxy-2-fluoro ribonucleotide
  modified_base 4..5: mod_base = OTHER; note = phosphorothioate internucleotide linkage
  modified_base 5..6: mod_base = OTHER; note = phosphorothioate internucleotide linkage
  modified_base 26: mod_base = OTHER; note = Thymine
atatagttatcgaggctcattctcat

SEQ ID NO: 1131 - RNA, 26 nt, synthetic construct
  source 1..26: mol_type = other RNA
  modified_base 26: mod_base = OTHER; note = inverted deoxyribonucleotide
  modified_base 1..11: mod_base = OTHER; note = 2'-OMe modified nucleotide
  modified_base 15..25: mod_base = OTHER; note = 2'-OMe modified nucleotide
  modified_base 12..14: mod_base = OTHER; note = 2-deoxy-2-fluoro ribonucleotide
  modified_base 3..4: mod_base = OTHER; note = phosphorothioate internucleotide linkage
  modified_base 4..5: mod_base = OTHER; note = phosphorothioate internucleotide linkage
  modified_base 26: mod_base = OTHER; note = Thymine
tatagttatcgaggctcattctcatt

SEQ ID NO: 1132 - RNA, 26 nt, synthetic construct
  source 1..26: mol_type = other RNA
  modified_base 26: mod_base = OTHER; note = inverted deoxyribonucleotide
  modified_base 1..13: mod_base = OTHER; note = 2'-OMe modified nucleotide
  modified_base 17..25: mod_base = OTHER; note = 2'-OMe modified nucleotide
  modified_base 14..16: mod_base = OTHER; note = 2-deoxy-2-fluoro ribonucleotide
  modified_base 5..6: mod_base = OTHER; note = phosphorothioate internucleotide linkage
  modified_base 6..7: mod_base = OTHER; note = phosphorothioate internucleotide linkage
tatatcagccccttattgttatacga

SEQ ID NO: 1133 - RNA, 21 nt, synthetic construct
  source 1..21: mol_type = other RNA
  modified_base 1..6: mod_base = OTHER; note = 2'-OMe modified nucleotide
  modified_base 10..21: mod_base = OTHER; note = 2'-OMe modified nucleotide
  modified_base 7..9: mod_base = OTHER; note = 2-deoxy-2-fluoro ribonucleotide
  modified_base 21: mod_base = OTHER; note = phosphorothioate internucleotide linkage
gccccttattgttatacgatt

SEQ ID NO: 1134 - RNA, 21 nt, synthetic construct
  source 1..21: mol_type = other RNA
  modified_base 1..6: mod_base = OTHER; note = 2'-OMe modified nucleotide
  modified_base 10..21: mod_base = OTHER; note = 2'-OMe modified nucleotide
  modified_base 7..9: mod_base = OTHER; note = 2-deoxy-2-fluoro ribonucleotide
  modified_base 20..21: mod_base = OTHER; note = phosphorothioate internucleotide linkage
ttatcgaggctcattctcatt

SEQ ID NO: 1135 - RNA, 21 nt, synthetic construct
  source 1..21: mol_type = other RNA
  modified_base 2: mod_base = OTHER; note = 2'-OMe modified nucleotide
  modified_base 4: mod_base = OTHER; note = 2'-OMe modified nucleotide
  modified_base 6: mod_base = OTHER; note = 2'-OMe modified nucleotide
  modified_base 10: mod_base = OTHER; note = 2'-OMe modified nucleotide
  modified_base 12: mod_base = OTHER; note = 2'-OMe modified nucleotide
  modified_base 14: mod_base = OTHER; note = 2'-OMe modified nucleotide
  modified_base 16: mod_base = OTHER; note = 2'-OMe modified nucleotide
  modified_base 18..21: mod_base = OTHER; note = 2'-OMe modified nucleotide
  modified_base 1: mod_base = OTHER; note = 2-deoxy-2-fluoro ribonucleotide
  modified_base 3: mod_base = OTHER; note = 2-deoxy-2-fluoro ribonucleotide
  modified_base 5: mod_base = OTHER; note = 2-deoxy-2-fluoro ribonucleotide
  modified_base 7..9: mod_base = OTHER; note = 2-deoxy-2-fluoro ribonucleotide
  modified_base 11: mod_base = OTHER; note = 2-deoxy-2-fluoro ribonucleotide
  modified_base 13: mod_base = OTHER; note = 2-deoxy-2-fluoro ribonucleotide
  modified_base 15: mod_base = OTHER; note = 2-deoxy-2-fluoro ribonucleotide
  modified_base 17: mod_base = OTHER; note = 2-deoxy-2-fluoro ribonucleotide
  modified_base 20..21: mod_base = OTHER; note = phosphorothioate internucleotide linkage
gccccttattgttatacgatt

SEQ ID NO: 1136 - RNA, 26 nt, synthetic construct
  source 1..26: mol_type = other RNA
  modified_base 26: mod_base = OTHER; note = inverted deoxyribonucleotide
  modified_base 1..13: mod_base = OTHER; note = 2'-OMe modified nucleotide
  modified_base 17..25: mod_base = OTHER; note = 2'-OMe modified nucleotide
  modified_base 14..16: mod_base = OTHER; note = 2-deoxy-2-fluoro ribonucleotide
  modified_base 5..6: mod_base = OTHER; note = phosphorothioate internucleotide linkage
  modified_base 6..7: mod_base = OTHER; note = phosphorothioate internucleotide linkage
tatatagttatcgaggctcattctca

SEQ ID NO: 1137 - RNA, 21 nt, synthetic construct
  source 1..21: mol_type = other RNA
  modified_base 2: mod_base = OTHER; note = 2'-OMe modified nucleotide
  modified_base 4: mod_base = OTHER; note = 2'-OMe modified nucleotide
  modified_base 6: mod_base = OTHER; note = 2'-OMe modified nucleotide
  modified_base 9: mod_base = OTHER; note = 2'-OMe modified nucleotide
  modified_base 12: mod_base = OTHER; note = 2'-OMe modified nucleotide
  modified_base 14: mod_base = OTHER; note = 2'-OMe modified nucleotide
  modified_base 16: mod_base = OTHER; note = 2'-OMe modified nucleotide
  modified_base 18: mod_base = OTHER; note = 2'-OMe modified nucleotide
  modified_base 19..21: mod_base = OTHER; note = 2'-OMe modified nucleotide
  modified_base 1: mod_base = OTHER; note = 2-deoxy-2-fluoro ribonucleotide
  modified_base 3: mod_base = OTHER; note = 2-deoxy-2-fluoro ribonucleotide
  modified_base 5: mod_base = OTHER; note = 2-deoxy-2-fluoro ribonucleotide
  modified_base 7..9: mod_base = OTHER; note = 2-deoxy-2-fluoro ribonucleotide
  modified_base 11: mod_base = OTHER; note = 2-deoxy-2-fluoro ribonucleotide
  modified_base 13: mod_base = OTHER; note = 2-deoxy-2-fluoro ribonucleotide
  modified_base 15: mod_base = OTHER; note = 2-deoxy-2-fluoro ribonucleotide
  modified_base 17: mod_base = OTHER; note = 2-deoxy-2-fluoro ribonucleotide
  modified_base 20..21: mod_base = OTHER; note = phosphorothioate internucleotide linkage
gccccttattgttatacgatt

SEQ ID NO: 1138 - RNA, 26 nt, synthetic construct
  source 1..26: mol_type = other RNA
  modified_base 1..14: mod_base = OTHER; note = 2'-OMe modified nucleotide
  modified_base 17..26: mod_base = OTHER; note = 2'-OMe modified nucleotide
  modified_base 15..16: mod_base = OTHER; note = 2-deoxy-2-fluoro ribonucleotide
  modified_base 7..8: mod_base = OTHER; note = phosphorothioate internucleotide linkage
  modified_base 25..26: mod_base = OTHER; note = phosphorothioate internucleotide linkage
tatataattatcgaggctcattctca

SEQ ID NO: 1139 - RNA, 21 nt, synthetic construct
  source 1..21: mol_type = other RNA
  modified_base 2: mod_base = OTHER; note = 2'-OMe modified nucleotide
  modified_base 4: mod_base = OTHER; note = 2'-OMe modified nucleotide
  modified_base 6: mod_base = OTHER; note = 2'-OMe modified nucleotide
  modified_base 10: mod_base = OTHER; note = 2'-OMe modified nucleotide
  modified_base 12: mod_base = OTHER; note = 2'-OMe modified nucleotide
  modified_base 14: mod_base = OTHER; note = 2'-OMe modified nucleotide
  modified_base 16: mod_base = OTHER; note = 2'-OMe modified nucleotide
  modified_base 18..21: mod_base = OTHER; note = 2'-OMe modified nucleotide
  modified_base 1: mod_base = OTHER; note = 2-deoxy-2-fluoro ribonucleotide
  modified_base 3: mod_base = OTHER; note = 2-deoxy-2-fluoro ribonucleotide
  modified_base 5: mod_base = OTHER; note = 2-deoxy-2-fluoro ribonucleotide
  modified_base 7..9: mod_base = OTHER; note = 2-deoxy-2-fluoro ribonucleotide
  modified_base 11: mod_base = OTHER; note = 2-deoxy-2-fluoro ribonucleotide
  modified_base 13: mod_base = OTHER; note = 2-deoxy-2-fluoro ribonucleotide
  modified_base 15: mod_base = OTHER; note = 2-deoxy-2-fluoro ribonucleotide
  modified_base 17: mod_base = OTHER; note = 2-deoxy-2-fluoro ribonucleotide
  modified_base 20..21: mod_base = OTHER; note = phosphorothioate internucleotide linkage
gccccttattgttatacgatt

SEQ ID NO: 1140 - RNA, 26 nt, synthetic construct
  source 1..26: mol_type = other RNA
  modified_base 1..14: mod_base = OTHER; note = 2'-OMe modified nucleotide
  modified_base 17..26: mod_base = OTHER; note = 2'-OMe modified nucleotide
  modified_base 15..16: mod_base = OTHER; note = 2-deoxy-2-fluoro ribonucleotide
  modified_base 7..8: mod_base = OTHER; note = phosphorothioate internucleotide linkage
  modified_base 25..26: mod_base = OTHER; note = phosphorothioate internucleotide linkage
tatataattatcgaggctcattctca

SEQ ID NO: 1141 - RNA, 26 nt, synthetic construct
  source 1..26: mol_type = other RNA
  modified_base 1..13: mod_base = OTHER; note = 2'-OMe modified nucleotide
  modified_base 17..25: mod_base = OTHER; note = 2'-OMe modified nucleotide
  modified_base 26: mod_base = OTHER; note = inverted deoxyribonucleotide
  modified_base 14..16: mod_base = OTHER; note = 2-deoxy-2-fluoro ribonucleotide
  modified_base 6..7: mod_base = OTHER; note = phosphorothioate internucleotide linkage
  modified_base 7..8: mod_base = OTHER; note = phosphorothioate internucleotide linkage
tatatcagccccttattgttatacga

SEQ ID NO: 1142 - RNA, 26 nt, synthetic construct
  source 1..26: mol_type = other RNA
  modified_base 26: mod_base = OTHER; note = inverted deoxyribonucleotide
  modified_base 1..13: mod_base = OTHER; note = 2'-OMe modified nucleotide
  modified_base 17..25: mod_base = OTHER; note = 2'-OMe modified nucleotide
  modified_base 14..16: mod_base = OTHER; note = 2-deoxy-2-fluoro ribonucleotide
  modified_base 7..8: mod_base = OTHER; note = phosphorothioate internucleotide linkage
tatatcagccccttattgttatacga

SEQ ID NO: 1143 - RNA, 26 nt, synthetic construct
  source 1..26: mol_type = other RNA
  modified_base 26: mod_base = OTHER; note = inverted deoxyribonucleotide
  modified_base 1..13: mod_base = OTHER; note = 2'-OMe modified nucleotide
  modified_base 17..25: mod_base = OTHER; note = 2'-OMe modified nucleotide
  modified_base 14..16: mod_base = OTHER; note = 2-deoxy-2-fluoro ribonucleotide
  modified_base 6..7: mod_base = OTHER; note = phosphorothioate internucleotide linkage
  modified_base 7..8: mod_base = OTHER; note = phosphorothioate internucleotide linkage
tatatagttatcgaggctcattctca

SEQ ID NO: 1144 - RNA, 26 nt, synthetic construct
  source 1..26: mol_type = other RNA
  modified_base 26: mod_base = OTHER; note = inverted deoxyribonucleotide
  modified_base 1..13: mod_base = OTHER; note = 2'-OMe modified nucleotide
  modified_base 17..25: mod_base = OTHER; note = 2'-OMe modified nucleotide
  modified_base 14..16: mod_base = OTHER; note = 2-deoxy-2-fluoro ribonucleotide
  modified_base 7..8: mod_base = OTHER; note = phosphorothioate internucleotide linkage
tatatagttatcgaggctcattctca

SEQ ID NO: 1145 - RNA, 22 nt, synthetic construct
  source 1..22: mol_type = other RNA
  modified_base 1..3: mod_base = OTHER; note = 2'-OMe modified nucleotide
  modified_base 5: mod_base = OTHER; note = 2'-OMe modified nucleotide
  modified_base 7: mod_base = OTHER; note = 2'-OMe modified nucleotide
  modified_base 9: mod_base = OTHER; note = 2'-OMe modified nucleotide
  modified_base 13: mod_base = OTHER; note = 2'-OMe modified nucleotide
  modified_base 15: mod_base = OTHER; note = 2'-OMe modified nucleotide
  modified_base 17: mod_base = OTHER; note = 2'-OMe modified nucleotide
  modified_base 19: mod_base = OTHER; note = 2'-OMe modified nucleotide
  modified_base 21..22: mod_base = OTHER; note = 2'-OMe modified nucleotide
  modified_base 4: mod_base = OTHER; note = 2-deoxy-2-fluoro ribonucleotide
  modified_base 6: mod_base = OTHER; note = 2-deoxy-2-fluoro ribonucleotide
  modified_base 8: mod_base = OTHER; note = 2-deoxy-2-fluoro ribonucleotide
  modified_base 10..12: mod_base = OTHER; note = 2-deoxy-2-fluoro ribonucleotide
  modified_base 14: mod_base = OTHER; note = 2-deoxy-2-fluoro ribonucleotide
  modified_base 16: mod_base = OTHER; note = 2-deoxy-2-fluoro ribonucleotide
  modified_base 18: mod_base = OTHER; note = 2-deoxy-2-fluoro ribonucleotide
  modified_base 20: mod_base = OTHER; note = 2-deoxy-2-fluoro ribonucleotide
  modified_base 1..2: mod_base = OTHER; note = phosphorothioate internucleotide linkage
  modified_base 21..22: mod_base = OTHER; note = phosphorothioate internucleotide linkage
tcagccccttattgttatacga

SEQ ID NO: 1146 - RNA, 25 nt, synthetic construct
  source 1..25: mol_type = other RNA
  modified_base 23: mod_base = OTHER; note = 2'-methoxyethyl nucleotide
  modified_base 24: mod_base = OTHER; note = inverted deoxyribonucleotide
  modified_base 25: mod_base = OTHER; note = 2'-deoxy nucleotide
  modified_base 1..10: mod_base = OTHER; note = 2'-OMe modified nucleotide
  modified_base 14..22: mod_base = OTHER; note = 2'-OMe modified nucleotide
  modified_base 11..13: mod_base = OTHER; note = 2-deoxy-2-fluoro ribonucleotide
  modified_base 3..4: mod_base = OTHER; note = phosphorothioate internucleotide linkage
  modified_base 23..24: mod_base = OTHER; note = phosphorothioate internucleotide linkage
  modified_base 24..25: mod_base = OTHER; note = Thymine
ggcagccccttattgttatacgatt

SEQ ID NO: 1147 - RNA, 26 nt, synthetic construct
  source 1..26: mol_type = other RNA
  modified_base 23: mod_base = OTHER; note = 2'-methoxyethyl nucleotide
  modified_base 26: mod_base = OTHER; note = inverted deoxyribonucleotide
  modified_base 1..10: mod_base = OTHER; note = 2'-OMe modified nucleotide
  modified_base 14..22: mod_base = OTHER; note = 2'-OMe modified nucleotide
  modified_base 24: mod_base = OTHER; note = 2'-OMe modified nucleotide
  modified_base 11..13: mod_base = OTHER; note = 2-deoxy-2-fluoro ribonucleotide
  modified_base 3..4: mod_base = OTHER; note = phosphorothioate internucleotide linkage
  modified_base 23..24: mod_base = OTHER; note = phosphorothioate internucleotide linkage
  modified_base 26: mod_base = OTHER; note = Thymine
ggcagccccttattgttatacgattt

SEQ ID NO: 1148 - RNA, 25 nt, synthetic construct
  source 1..25: mol_type = other RNA
  modified_base 23: mod_base = OTHER; note = 2'-methoxyethyl nucleotide
  modified_base 24: mod_base = OTHER; note = inverted deoxyribonucleotide
  modified_base 25: mod_base = OTHER; note = 2'-deoxy nucleotide
  modified_base 1: mod_base = OTHER; note = 2',3'-seco nucleotide
  modified_base 2..10: mod_base = OTHER; note = 2'-OMe modified nucleotide
  modified_base 14..22: mod_base = OTHER; note = 2'-OMe modified nucleotide
  modified_base 11..13: mod_base = OTHER; note = 2-deoxy-2-fluoro ribonucleotide
  modified_base 3..4: mod_base = OTHER; note = phosphorothioate internucleotide linkage
  modified_base 23..24: mod_base = OTHER; note = phosphorothioate internucleotide linkage
  modified_base 24..25: mod_base = OTHER; note = Thymine
ggcagccccttattgttatacgatt

SEQ ID NO: 1149 - RNA, 25 nt, synthetic construct
  source 1..25: mol_type = other RNA
  modified_base 23: mod_base = OTHER; note = 2'-methoxyethyl nucleotide
  modified_base 4: mod_base = OTHER; note = inverted deoxyribonucleotide
  modified_base 24: mod_base = OTHER; note = inverted deoxyribonucleotide
  modified_base 25: mod_base = OTHER; note = 2'-deoxy nucleotide
  modified_base 1..3: mod_base = OTHER; note = 2'-OMe modified nucleotide
  modified_base 5..10: mod_base = OTHER; note = 2'-OMe modified nucleotide
  modified_base 14..22: mod_base = OTHER; note = 2'-OMe modified nucleotide
  modified_base 11..13: mod_base = OTHER; note = 2-deoxy-2-fluoro ribonucleotide
  modified_base 3..4: mod_base = OTHER; note = phosphorothioate internucleotide linkage
  modified_base 23..24: mod_base = OTHER; note = phosphorothioate internucleotide linkage
  modified_base 24..25: mod_base = OTHER; note = Thymine
ggcagccccttattgttatacgatt

SEQ ID NO: 1150 - RNA, 25 nt, synthetic construct
  source 1..25: mol_type = other RNA
  modified_base 21: mod_base = OTHER; note = 2'-methoxyethyl nucleotide
  modified_base 22: mod_base = OTHER; note = inverted deoxyribonucleotide
  modified_base 23..25: mod_base = OTHER; note = 2'-deoxy nucleotide
  modified_base 1..8: mod_base = OTHER; note = 2'-OMe modified nucleotide
  modified_base 12..20: mod_base = OTHER; note = 2'-OMe modified nucleotide
  modified_base 9..11: mod_base = OTHER; note = 2-deoxy-2-fluoro ribonucleotide
  modified_base 1..2: mod_base = OTHER; note = phosphorothioate internucleotide linkage
  modified_base 21..22: mod_base = OTHER; note = phosphorothioate internucleotide linkage
  modified_base 22..25: mod_base = OTHER; note = Thymine
cagccccttattgttatacgatttt

SEQ ID NO: 1151 - RNA, 21 nt, synthetic construct
  source 1..21: mol_type = other RNA
  modified_base 2: mod_base = OTHER; note = 2'-OMe modified nucleotide
  modified_base 4: mod_base = OTHER; note = 2'-OMe modified nucleotide
  modified_base 6: mod_base = OTHER; note = 2'-OMe modified nucleotide
  modified_base 10: mod_base = OTHER; note = 2'-OMe modified nucleotide
  modified_base 12: mod_base = OTHER; note = 2'-OMe modified nucleotide
  modified_base 14: mod_base = OTHER; note = 2'-OMe modified nucleotide
  modified_base 16: mod_base = OTHER; note = 2'-OMe modified nucleotide
  modified_base 18..21: mod_base = OTHER; note = 2'-OMe modified nucleotide
  modified_base 1: mod_base = OTHER; note = 2-deoxy-2-fluoro ribonucleotide
  modified_base 3: mod_base = OTHER; note = 2-deoxy-2-fluoro ribonucleotide
  modified_base 5: mod_base = OTHER; note = 2-deoxy-2-fluoro ribonucleotide
  modified_base 7..9: mod_base = OTHER; note = 2-deoxy-2-fluoro ribonucleotide
  modified_base 11: mod_base = OTHER; note = 2-deoxy-2-fluoro ribonucleotide
  modified_base 13: mod_base = OTHER; note = 2-deoxy-2-fluoro ribonucleotide
  modified_base 15: mod_base = OTHER; note = 2-deoxy-2-fluoro ribonucleotide
  modified_base 17: mod_base = OTHER; note = 2-deoxy-2-fluoro ribonucleotide
  modified_base 20..21: mod_base = OTHER; note = phosphorothioate internucleotide linkage
gccccttattgttatacgatt

SEQ ID NO: 1152 - RNA, 21 nt, synthetic construct
  source 1..21: mol_type = other RNA
  modified_base 2: mod_base = OTHER; note = 2'-OMe modified nucleotide
  modified_base 4: mod_base = OTHER; note = 2'-OMe modified nucleotide
  modified_base 6: mod_base = OTHER; note = 2'-OMe modified nucleotide
  modified_base 10: mod_base = OTHER; note = 2'-OMe modified nucleotide
  modified_base 12: mod_base = OTHER; note = 2'-OMe modified nucleotide
  modified_base 14: mod_base = OTHER; note = 2'-OMe modified nucleotide
  modified_base 16: mod_base = OTHER; note = 2'-OMe modified nucleotide
  modified_base 18..21: mod_base = OTHER; note = 2'-OMe modified nucleotide
  modified_base 1: mod_base = OTHER; note = 2-deoxy-2-fluoro ribonucleotide
  modified_base 3: mod_base = OTHER; note = 2-deoxy-2-fluoro ribonucleotide
  modified_base 5: mod_base = OTHER; note = 2-deoxy-2-fluoro ribonucleotide
  modified_base 7..9: mod_base = OTHER; note = 2-deoxy-2-fluoro ribonucleotide
  modified_base 11: mod_base = OTHER; note = 2-deoxy-2-fluoro ribonucleotide
  modified_base 13: mod_base = OTHER; note = 2-deoxy-2-fluoro ribonucleotide
  modified_base 15: mod_base = OTHER; note = 2-deoxy-2-fluoro ribonucleotide
  modified_base 17: mod_base = OTHER; note = 2-deoxy-2-fluoro ribonucleotide
  modified_base 20..21: mod_base = OTHER; note = phosphorothioate internucleotide linkage
gccccttattgttatacgatt

SEQ ID NO: 1153 - RNA, 26 nt, synthetic construct
  source 1..26: mol_type = other RNA
  modified_base 26: mod_base = OTHER; note = inverted deoxyribonucleotide
  modified_base 1..13: mod_base = OTHER; note = 2'-OMe modified nucleotide
  modified_base 17..25: mod_base = OTHER; note = 2'-OMe modified nucleotide
  modified_base 14..16: mod_base = OTHER; note = 2-deoxy-2-fluoro ribonucleotide
  modified_base 7..8: mod_base = OTHER; note = phosphorothioate internucleotide linkage
  modified_base 8..9: mod_base = OTHER; note = phosphorothioate internucleotide linkage
tatatagttatcgaggctcattctca

SEQ ID NO: 1154 - RNA, 26 nt, synthetic construct
  source 1..26: mol_type = other RNA
  modified_base 26: mod_base = OTHER; note = inverted deoxyribonucleotide
  modified_base 1..13: mod_base = OTHER; note = 2'-OMe modified nucleotide
  modified_base 17..25: mod_base = OTHER; note = 2'-OMe modified nucleotide
  modified_base 14..16: mod_base = OTHER; note = 2-deoxy-2-fluoro ribonucleotide
  modified_base 8..9: mod_base = OTHER; note = phosphorothioate internucleotide linkage
  modified_base 9..10: mod_base = OTHER; note = phosphorothioate internucleotide linkage
tatatagttatcgaggctcattctca

SEQ ID NO: 1155 - RNA, 26 nt, synthetic construct
  source 1..26: mol_type = other RNA
  modified_base 26: mod_base = OTHER; note = inverted deoxyribonucleotide
  modified_base 1..13: mod_base = OTHER; note = 2'-OMe modified nucleotide
  modified_base 17..25: mod_base = OTHER; note = 2'-OMe modified nucleotide
  modified_base 14..16: mod_base = OTHER; note = 2-deoxy-2-fluoro ribonucleotide
  modified_base 5..6: mod_base = OTHER; note = phosphorothioate internucleotide linkage
  modified_base 6..7: mod_base = OTHER; note = phosphorothioate internucleotide linkage
gcgatagttatcgaggctcattctca

SEQ ID NO: 1156 - RNA, 26 nt, synthetic construct
  source 1..26: mol_type = other RNA
  modified_base 26: mod_base = OTHER; note = inverted deoxyribonucleotide
  modified_base 1..13: mod_base = OTHER; note = 2'-OMe modified nucleotide
  modified_base 17..25: mod_base = OTHER; note = 2'-OMe modified nucleotide
  modified_base 14..16: mod_base = OTHER; note = 2-deoxy-2-fluoro ribonucleotide
  modified_base 5..6: mod_base = OTHER; note = phosphorothioate internucleotide linkage
  modified_base 6..7: mod_base = OTHER; note = phosphorothioate internucleotide linkage
tgaatagttatcgaggctcattctca

SEQ ID NO: 1157 - RNA, 26 nt, synthetic construct
  source 1..26: mol_type = other RNA
  modified_base 26: mod_base = OTHER; note = inverted deoxyribonucleotide
  modified_base 1..13: mod_base = OTHER; note = 2'-OMe modified nucleotide
  modified_base 17..25: mod_base = OTHER; note = 2'-OMe modified nucleotide
  modified_base 14..16: mod_base = OTHER; note = 2-deoxy-2-fluoro ribonucleotide
  modified_base 5..6: mod_base = OTHER; note = phosphorothioate internucleotide linkage
  modified_base 6..7: mod_base = OTHER; note = phosphorothioate internucleotide linkage
atcgtagttatcgaggctcattctca

SEQ ID NO: 1158 - RNA, 26 nt, synthetic construct
  source 1..26: mol_type = other RNA
  modified_base 2: mod_base = OTHER; note = inverted deoxyribonucleotide
  modified_base 26: mod_base = OTHER; note = inverted deoxyribonucleotide
  modified_base 1: mod_base = OTHER; note = 2'-OMe modified nucleotide
  modified_base 3..13: mod_base = OTHER; note = 2'-OMe modified nucleotide
  modified_base 17..25: mod_base = OTHER; note = 2'-OMe modified nucleotide
  modified_base 14..16: mod_base = OTHER; note = 2-deoxy-2-fluoro ribonucleotide
  modified_base 5..6: mod_base = OTHER; note = phosphorothioate internucleotide linkage
  modified_base 6..7: mod_base = OTHER; note = phosphorothioate internucleotide linkage
tatatagttatcgaggctcattctca

SEQ ID NO: 1159 - RNA, 26 nt, synthetic construct
  source 1..26: mol_type = other RNA
  modified_base 5: mod_base = OTHER; note = inverted deoxyribonucleotide
  modified_base 26: mod_base = OTHER; note = inverted deoxyribonucleotide
  modified_base 1..4: mod_base = OTHER; note = 2'-OMe modified nucleotide
  modified_base 6..13: mod_base = OTHER; note = 2'-OMe modified nucleotide
  modified_base 17..25: mod_base = OTHER; note = 2'-OMe modified nucleotide
  modified_base 14..16: mod_base = OTHER; note = 2-deoxy-2-fluoro ribonucleotide
  modified_base 5..6: mod_base = OTHER; note = phosphorothioate internucleotide linkage
  modified_base 6..7: mod_base = OTHER; note = phosphorothioate internucleotide linkage
tataaagttatcgaggctcattctca

SEQ ID NO: 1160 - RNA, 26 nt, synthetic construct
  source 1..26: mol_type = other RNA
  modified_base 6: mod_base = OTHER; note = inverted deoxyribonucleotide
  modified_base 26: mod_base = OTHER; note = inverted deoxyribonucleotide
  modified_base 1..5: mod_base = OTHER; note = 2'-OMe modified nucleotide
  modified_base 7..13: mod_base = OTHER; note = 2'-OMe modified nucleotide
  modified_base 17..25: mod_base = OTHER; note = 2'-OMe modified nucleotide
  modified_base 14..16: mod_base = OTHER; note = 2-deoxy-2-fluoro ribonucleotide
  modified_base 5..6: mod_base = OTHER; note = phosphorothioate internucleotide linkage
  modified_base 6..7: mod_base = OTHER; note = phosphorothioate internucleotide linkage
tatatagttatcgaggctcattctca

SEQ ID NO: 1161 - RNA, 20 nt, synthetic construct
  source 1..20: mol_type = other RNA
  modified_base 1: mod_base = OTHER; note = 2'-OMe modified nucleotide
  modified_base 3: mod_base = OTHER; note = 2'-OMe modified nucleotide
  modified_base 5: mod_base = OTHER; note = 2'-OMe modified nucleotide
  modified_base 7: mod_base = OTHER; note = 2'-OMe modified nucleotide
  modified_base 11: mod_base = OTHER; note = 2'-OMe modified nucleotide
  modified_base 13: mod_base = OTHER; note = 2'-OMe modified nucleotide
  modified_base 15: mod_base = OTHER; note = 2'-OMe modified nucleotide
  modified_base 17: mod_base = OTHER; note = 2'-OMe modified nucleotide
  modified_base 19..20: mod_base = OTHER; note = 2'-OMe modified nucleotide
  modified_base 2: mod_base = OTHER; note = 2-deoxy-2-fluoro ribonucleotide
  modified_base 4: mod_base = OTHER; note = 2-deoxy-2-fluoro ribonucleotide
  modified_base 6: mod_base = OTHER; note = 2-deoxy-2-fluoro ribonucleotide
  modified_base 8..10: mod_base = OTHER; note = 2-deoxy-2-fluoro ribonucleotide
  modified_base 12: mod_base = OTHER; note = 2-deoxy-2-fluoro ribonucleotide
  modified_base 14: mod_base = OTHER; note = 2-deoxy-2-fluoro ribonucleotide
  modified_base 16: mod_base = OTHER; note = 2-deoxy-2-fluoro ribonucleotide
  modified_base 18: mod_base = OTHER; note = 2-deoxy-2-fluoro ribonucleotide
  modified_base 19..20: mod_base = OTHER; note = phosphorothioate internucleotide linkage
agccccttattgttatacga

SEQ ID NO: 1162 - RNA, 21 nt, synthetic construct
  source 1..21: mol_type = other RNA
  modified_base 1: mod_base = OTHER; note = 2'-OMe modified nucleotide
  modified_base 2: mod_base = OTHER; note = 2'-OMe modified nucleotide
  modified_base 4: mod_base = OTHER; note = 2'-OMe modified nucleotide
  modified_base 6: mod_base = OTHER; note = 2'-OMe modified nucleotide
  modified_base 8: mod_base = OTHER; note = 2'-OMe modified nucleotide
  modified_base 12: mod_base = OTHER; note = 2'-OMe modified nucleotide
  modified_base 14: mod_base = OTHER; note = 2'-OMe modified nucleotide
  modified_base 16: mod_base = OTHER; note = 2'-OMe modified nucleotide
  modified_base 18: mod_base = OTHER; note = 2'-OMe modified nucleotide
  modified_base 20..21: mod_base = OTHER; note = 2'-OMe modified nucleotide
  modified_base 3: mod_base = OTHER; note = 2-deoxy-2-fluoro ribonucleotide
  modified_base 5: mod_base = OTHER; note = 2-deoxy-2-fluoro ribonucleotide
  modified_base 7: mod_base = OTHER; note = 2-deoxy-2-fluoro ribonucleotide
  modified_base 9..11: mod_base = OTHER; note = 2-deoxy-2-fluoro ribonucleotide
  modified_base 13: mod_base = OTHER; note = 2-deoxy-2-fluoro ribonucleotide
  modified_base 15: mod_base = OTHER; note = 2-deoxy-2-fluoro ribonucleotide
  modified_base 17: mod_base = OTHER; note = 2-deoxy-2-fluoro ribonucleotide
  modified_base 19: mod_base = OTHER; note = 2-deoxy-2-fluoro ribonucleotide
  modified_base 20..21: mod_base = OTHER; note = phosphorothioate internucleotide linkage
aagccccttattgttatacga

SEQ ID NO: 1163 - RNA, 20 nt, synthetic construct
  source 1..20: mol_type = other RNA
  modified_base 1: mod_base = OTHER; note = 2'-OMe modified nucleotide
  modified_base 3: mod_base = OTHER; note = 2'-OMe modified nucleotide
  modified_base 5: mod_base = OTHER; note = 2'-OMe modified nucleotide
  modified_base 7: mod_base = OTHER; note = 2'-OMe modified nucleotide
  modified_base 11: mod_base = OTHER; note = 2'-OMe modified nucleotide
  modified_base 13: mod_base = OTHER; note = 2'-OMe modified nucleotide
  modified_base 15: mod_base = OTHER; note = 2'-OMe modified nucleotide
  modified_base 17: mod_base = OTHER; note = 2'-OMe modified nucleotide
  modified_base 19..20: mod_base = OTHER; note = 2'-OMe modified nucleotide
  modified_base 2: mod_base = OTHER; note = 2-deoxy-2-fluoro ribonucleotide
  modified_base 4: mod_base = OTHER; note = 2-deoxy-2-fluoro ribonucleotide
  modified_base 6: mod_base = OTHER; note = 2-deoxy-2-fluoro ribonucleotide
  modified_base 8..10: mod_base = OTHER; note = 2-deoxy-2-fluoro ribonucleotide
  modified_base 12: mod_base = OTHER; note = 2-deoxy-2-fluoro ribonucleotide
  modified_base 14: mod_base = OTHER; note = 2-deoxy-2-fluoro ribonucleotide
  modified_base 16: mod_base = OTHER; note = 2-deoxy-2-fluoro ribonucleotide
  modified_base 18: mod_base = OTHER; note = 2-deoxy-2-fluoro ribonucleotide
  modified_base 1: mod_base = OTHER; note = phosphorothioate internucleotide linkage
  modified_base 1..2: mod_base = OTHER; note = phosphorothioate internucleotide linkage
  modified_base 20: mod_base = OTHER; note = phosphorothioate internucleotide linkage
agccccttattgttatacga

SEQ ID NO: 1164 - RNA, 22 nt, synthetic construct
  source 1..22: mol_type = other RNA
  modified_base 1..3: mod_base = OTHER; note = 2'-OMe modified nucleotide
  modified_base 5: mod_base = OTHER; note = 2'-OMe modified nucleotide
  modified_base 7: mod_base = OTHER; note = 2'-OMe modified nucleotide
  modified_base 9: mod_base = OTHER; note = 2'-OMe modified nucleotide
  modified_base 13: mod_base = OTHER; note = 2'-OMe modified nucleotide
  modified_base 15: mod_base = OTHER; note = 2'-OMe modified nucleotide
  modified_base 17: mod_base = OTHER; note = 2'-OMe modified nucleotide
  modified_base 19: mod_base = OTHER; note = 2'-OMe modified nucleotide
  modified_base 21..22: mod_base = OTHER; note = 2'-OMe modified nucleotide
  modified_base 4: mod_base = OTHER; note = 2-deoxy-2-fluoro ribonucleotide
  modified_base 6: mod_base = OTHER; note = 2-deoxy-2-fluoro ribonucleotide
  modified_base 8: mod_base = OTHER; note = 2-deoxy-2-fluoro ribonucleotide
  modified_base 10..12: mod_base = OTHER; note = 2-deoxy-2-fluoro ribonucleotide
  modified_base 14: mod_base = OTHER; note = 2-deoxy-2-fluoro ribonucleotide
  modified_base 16: mod_base = OTHER; note = 2-deoxy-2-fluoro ribonucleotide
  modified_base 18: mod_base = OTHER; note = 2-deoxy-2-fluoro ribonucleotide
  modified_base 20: mod_base = OTHER; note = 2-deoxy-2-fluoro ribonucleotide
  modified_base 1..2: mod_base = OTHER; note = phosphorothioate internucleotide linkage
  modified_base 21..22: mod_base = OTHER; note = phosphorothioate internucleotide linkage
gcagccccttattgttatacga

SEQ ID NO: 1165 - RNA, 26 nt, synthetic construct
  source 1..26: mol_type = other RNA
  modified_base 1..14: mod_base = OTHER; note = 2'-OMe modified nucleotide
  modified_base 17..26: mod_base = OTHER; note = 2'-OMe modified nucleotide
  modified_base 15..16: mod_base = OTHER; note = 2-deoxy-2-fluoro ribonucleotide
  modified_base 7..8: mod_base = OTHER; note = phosphorothioate internucleotide linkage
  modified_base 25..26: mod_base = OTHER; note = phosphorothioate internucleotide linkage
tatatagttatcgaggctcattctca

SEQ ID NO: 1166 - RNA, 22 nt, synthetic construct
  source 1..22: mol_type = other RNA
  modified_base 1..3: mod_base = OTHER; note = 2'-OMe modified nucleotide
  modified_base 5: mod_base = OTHER; note = 2'-OMe modified nucleotide
  modified_base 7: mod_base = OTHER; note = 2'-OMe modified nucleotide
  modified_base 9: mod_base = OTHER; note = 2'-OMe modified nucleotide
  modified_base 13: mod_base = OTHER; note = 2'-OMe modified nucleotide
  modified_base 15: mod_base = OTHER; note = 2'-OMe modified nucleotide
  modified_base 17: mod_base = OTHER; note = 2'-OMe modified nucleotide
  modified_base 19: mod_base = OTHER; note = 2'-OMe modified nucleotide
  modified_base 21..22: mod_base = OTHER; note = 2'-OMe modified nucleotide
  modified_base 4: mod_base = OTHER; note = 2-deoxy-2-fluoro ribonucleotide
  modified_base 6: mod_base = OTHER; note = 2-deoxy-2-fluoro ribonucleotide
  modified_base 8: mod_base = OTHER; note = 2-deoxy-2-fluoro ribonucleotide
  modified_base 10..12: mod_base = OTHER; note = 2-deoxy-2-fluoro ribonucleotide
  modified_base 14: mod_base = OTHER; note = 2-deoxy-2-fluoro ribonucleotide
  modified_base 16: mod_base = OTHER; note = 2-deoxy-2-fluoro ribonucleotide
  modified_base 18: mod_base = OTHER; note = 2-deoxy-2-fluoro ribonucleotide
  modified_base 20: mod_base = OTHER; note = 2-deoxy-2-fluoro ribonucleotide
  modified_base 1: mod_base = OTHER; note = phosphorothioate internucleotide linkage
  modified_base 1..2: mod_base = OTHER; note = phosphorothioate internucleotide linkage
  modified_base 21..22: mod_base = OTHER; note = phosphorothioate internucleotide linkage
gcagccccttattgttatacga

SEQ ID NO: 1167 - RNA, 21 nt, synthetic construct
  source 1..21: mol_type = other RNA
  modified_base 2: mod_base = OTHER; note = 2'-OMe modified nucleotide
  modified_base 4: mod_base = OTHER; note = 2'-OMe modified nucleotide
  modified_base 6: mod_base = OTHER; note = 2'-OMe modified nucleotide
  modified_base 10: mod_base = OTHER; note = 2'-OMe modified nucleotide
  modified_base 12: mod_base = OTHER; note = 2'-OMe modified nucleotide
  modified_base 14: mod_base = OTHER; note = 2'-OMe modified nucleotide
  modified_base 16: mod_base = OTHER; note = 2'-OMe modified nucleotide
  modified_base 18..21: mod_base = OTHER; note = 2'-OMe modified nucleotide
  modified_base 1: mod_base = OTHER; note = 2-deoxy-2-fluoro ribonucleotide
  modified_base 3: mod_base = OTHER; note = 2-deoxy-2-fluoro ribonucleotide
  modified_base 5: mod_base = OTHER; note = 2-deoxy-2-fluoro ribonucleotide
  modified_base 7..9: mod_base = OTHER; note = 2-deoxy-2-fluoro ribonucleotide
  modified_base 11: mod_base = OTHER; note = 2-deoxy-2-fluoro ribonucleotide
  modified_base 13: mod_base = OTHER; note = 2-deoxy-2-fluoro ribonucleotide
  modified_base 15: mod_base = OTHER; note = 2-deoxy-2-fluoro ribonucleotide
  modified_base 17: mod_base = OTHER; note = 2-deoxy-2-fluoro ribonucleotide
  modified_base 20..21: mod_base = OTHER; note = phosphorothioate internucleotide linkage
gccccttattgttatacgatt

SEQ ID NO: 1168 - RNA, 21 nt, synthetic construct
  source 1..21: mol_type = other RNA
  modified_base 2: mod_base = OTHER; note = 2'-OMe modified nucleotide
  modified_base 4: mod_base = OTHER; note = 2'-OMe modified nucleotide
  modified_base 6: mod_base = OTHER; note = 2'-OMe modified nucleotide
  modified_base 10: mod_base = OTHER; note = 2'-OMe modified nucleotide
  modified_base 12: mod_base = OTHER; note = 2'-OMe modified nucleotide
  modified_base 14: mod_base = OTHER; note = 2'-OMe modified nucleotide
  modified_base 16: mod_base = OTHER; note = 2'-OMe modified nucleotide
  modified_base 18..21: mod_base = OTHER; note = 2'-OMe modified nucleotide
  modified_base 1: mod_base = OTHER; note = 2-deoxy-2-fluoro ribonucleotide
  modified_base 3: mod_base = OTHER; note = 2-deoxy-2-fluoro ribonucleotide
  modified_base 5: mod_base = OTHER; note = 2-deoxy-2-fluoro ribonucleotide
  modified_base 7..9: mod_base = OTHER; note = 2-deoxy-2-fluoro ribonucleotide
  modified_base 11: mod_base = OTHER; note = 2-deoxy-2-fluoro ribonucleotide
  modified_base 13: mod_base = OTHER; note = 2-deoxy-2-fluoro ribonucleotide
  modified_base 15: mod_base = OTHER; note = 2-deoxy-2-fluoro ribonucleotide
  modified_base 17: mod_base = OTHER; note = 2-deoxy-2-fluoro ribonucleotide
  modified_base 20..21: mod_base = OTHER; note = phosphorothioate internucleotide linkage
gccccttattgttatacgatt

SEQ ID NO: 1169 - RNA, 21 nt, synthetic construct
  source 1..21: mol_type = other RNA
  modified_base 2: mod_base = OTHER; note = 2'-OMe modified nucleotide
  modified_base 4: mod_base = OTHER; note = 2'-OMe modified nucleotide
  modified_base 6: mod_base = OTHER; note = 2'-OMe modified nucleotide
  modified_base 10: mod_base = OTHER; note = 2'-OMe modified nucleotide
  modified_base 12: mod_base = OTHER; note = 2'-OMe modified nucleotide
  modified_base 14: mod_base = OTHER; note = 2'-OMe modified nucleotide
  modified_base 16: mod_base = OTHER; note = 2'-OMe modified nucleotide
  modified_base 18..21: mod_base = OTHER; note = 2'-OMe modified nucleotide
  modified_base 1: mod_base = OTHER; note = 2-deoxy-2-fluoro ribonucleotide
  modified_base 3: mod_base = OTHER; note = 2-deoxy-2-fluoro ribonucleotide
  modified_base 5: mod_base = OTHER; note = 2-deoxy-2-fluoro ribonucleotide
  modified_base 7..9: mod_base = OTHER; note = 2-deoxy-2-fluoro ribonucleotide
  modified_base 11: mod_base = OTHER; note = 2-deoxy-2-fluoro ribonucleotide
  modified_base 13: mod_base = OTHER; note = 2-deoxy-2-fluoro ribonucleotide
  modified_base 15: mod_base = OTHER; note = 2-deoxy-2-fluoro ribonucleotide
  modified_base 17: mod_base = OTHER; note = 2-deoxy-2-fluoro ribonucleotide
  modified_base 20..21: mod_base = OTHER; note = phosphorothioate internucleotide linkage
gccccttattgttatacgatt

SEQ ID NO: 1170 - RNA, 21 nt, synthetic construct
  source 1..21: mol_type = other RNA
  modified_base 1..2: mod_base = OTHER; note = 2'-OMe modified nucleotide
  modified_base 4: mod_base = OTHER; note = 2'-OMe modified nucleotide
  modified_base 6: mod_base = OTHER; note = 2'-OMe modified nucleotide
  modified_base 8: mod_base = OTHER; note = 2'-OMe modified nucleotide
  modified_base 12: mod_base = OTHER; note = 2'-OMe modified nucleotide
  modified_base 14: mod_base = OTHER; note = 2'-OMe modified nucleotide
  modified_base 16: mod_base = OTHER; note = 2'-OMe modified nucleotide
  modified_base 18: mod_base = OTHER; note = 2'-OMe modified nucleotide
  modified_base 20..21: mod_base = OTHER; note = 2'-OMe modified nucleotide
  modified_base 3: mod_base = OTHER; note = 2-deoxy-2-fluoro ribonucleotide
  modified_base 5: mod_base = OTHER; note = 2-deoxy-2-fluoro ribonucleotide
  modified_base 7: mod_base = OTHER; note = 2-deoxy-2-fluoro ribonucleotide
  modified_base 9..11: mod_base = OTHER; note = 2-deoxy-2-fluoro ribonucleotide
  modified_base 13: mod_base = OTHER; note = 2-deoxy-2-fluoro ribonucleotide
  modified_base 15: mod_base = OTHER; note = 2-deoxy-2-fluoro ribonucleotide
  modified_base 17: mod_base = OTHER; note = 2-deoxy-2-fluoro ribonucleotide
  modified_base 19: mod_base = OTHER; note = 2-deoxy-2-fluoro ribonucleotide
  modified_base 20..21: mod_base = OTHER; note = phosphorothioate internucleotide linkage
acgccccttattgttatacga

SEQ ID NO: 1171 - RNA, 21 nt, synthetic construct
  source 1..21: mol_type = other RNA
  modified_base 1..2: mod_base = OTHER; note = 2'-OMe modified nucleotide
  modified_base 4: mod_base = OTHER; note = 2'-OMe modified nucleotide
  modified_base 6: mod_base = OTHER; note = 2'-OMe modified nucleotide
  modified_base 8: mod_base = OTHER; note = 2'-OMe modified nucleotide
  modified_base 12: mod_base = OTHER; note = 2'-OMe modified nucleotide
  modified_base 14: mod_base = OTHER; note = 2'-OMe modified nucleotide
  modified_base 16: mod_base = OTHER; note = 2'-OMe modified nucleotide
  modified_base 18: mod_base = OTHER; note = 2'-OMe modified nucleotide
  modified_base 20..21: mod_base = OTHER; note = 2'-OMe modified nucleotide
  modified_base 3: mod_base = OTHER; note = 2-deoxy-2-fluoro ribonucleotide
  modified_base 5: mod_base = OTHER; note = 2-deoxy-2-fluoro ribonucleotide
  modified_base 7: mod_base = OTHER; note = 2-deoxy-2-fluoro ribonucleotide
  modified_base 9..11: mod_base = OTHER; note = 2-deoxy-2-fluoro ribonucleotide
  modified_base 13: mod_base = OTHER; note = 2-deoxy-2-fluoro ribonucleotide
  modified_base 15: mod_base = OTHER; note = 2-deoxy-2-fluoro ribonucleotide
  modified_base 17: mod_base = OTHER; note = 2-deoxy-2-fluoro ribonucleotide
  modified_base 19: mod_base = OTHER; note = 2-deoxy-2-fluoro ribonucleotide
  modified_base 1: mod_base = OTHER; note = phosphorothioate internucleotide linkage
  modified_base 1..2: mod_base = OTHER; note = phosphorothioate internucleotide linkage
  modified_base 21: mod_base = OTHER; note = phosphorothioate internucleotide linkage
aagccccttattgttatacga

SEQ ID NO: 1172 - RNA, 21 nt, synthetic construct
  source 1..21: mol_type = other RNA
  modified_base 1..2: mod_base = OTHER; note = 2'-OMe modified nucleotide
  modified_base 4: mod_base = OTHER; note = 2'-OMe modified nucleotide
  modified_base 6: mod_base = OTHER; note = 2'-OMe modified nucleotide
  modified_base 8: mod_base = OTHER; note = 2'-OMe modified nucleotide
  modified_base 12: mod_base = OTHER; note = 2'-OMe modified nucleotide
  modified_base 14: mod_base = OTHER; note = 2'-OMe modified nucleotide
  modified_base 16: mod_base = OTHER; note = 2'-OMe modified nucleotide
  modified_base 18: mod_base = OTHER; note = 2'-OMe modified nucleotide
  modified_base 20..21: mod_base = OTHER; note = 2'-OMe modified nucleotide
  modified_base 3: mod_base = OTHER; note = 2-deoxy-2-fluoro ribonucleotide
  modified_base 5: mod_base = OTHER; note = 2-deoxy-2-fluoro ribonucleotide
  modified_base 7: mod_base = OTHER; note = 2-deoxy-2-fluoro ribonucleotide
  modified_base 9..11: mod_base = OTHER; note = 2-deoxy-2-fluoro ribonucleotide
  modified_base 13: mod_base = OTHER; note = 2-deoxy-2-fluoro ribonucleotide
  modified_base 15: mod_base = OTHER; note = 2-deoxy-2-fluoro ribonucleotide
  modified_base 17: mod_base = OTHER; note = 2-deoxy-2-fluoro ribonucleotide
  modified_base 19: mod_base = OTHER; note = 2-deoxy-2-fluoro ribonucleotide
  modified_base 1: mod_base = OTHER; note = phosphorothioate internucleotide linkage
  modified_base 1..2: mod_base = OTHER; note = phosphorothioate internucleotide linkage
  modified_base 21: mod_base = OTHER; note = phosphorothioate internucleotide linkage
acgccccttattgttatacga

SEQ ID NO: 1173 - RNA, 22 nt, synthetic construct
  source 1..22: mol_type = other RNA
  modified_base 1..3: mod_base = OTHER; note = 2'-OMe modified nucleotide
  modified_base 5: mod_base = OTHER; note = 2'-OMe modified nucleotide
  modified_base 7: mod_base = OTHER; note = 2'-OMe modified nucleotide
  modified_base 9: mod_base = OTHER; note = 2'-OMe modified nucleotide
  modified_base 13: mod_base = OTHER; note = 2'-OMe modified nucleotide
  modified_base 15: mod_base = OTHER; note = 2'-OMe modified nucleotide
  modified_base 17: mod_base = OTHER; note = 2'-OMe modified nucleotide
  modified_base 19: mod_base = OTHER; note = 2'-OMe modified nucleotide
  modified_base 21..22: mod_base = OTHER; note = 2'-OMe modified nucleotide
  modified_base 4: mod_base = OTHER; note = 2-deoxy-2-fluoro ribonucleotide
  modified_base 6: mod_base = OTHER; note = 2-deoxy-2-fluoro ribonucleotide
  modified_base 8: mod_base = OTHER; note = 2-deoxy-2-fluoro ribonucleotide
  modified_base 10..12: mod_base = OTHER; note = 2-deoxy-2-fluoro ribonucleotide
  modified_base 14: mod_base = OTHER; note = 2-deoxy-2-fluoro ribonucleotide
  modified_base 16: mod_base = OTHER; note = 2-deoxy-2-fluoro ribonucleotide
  modified_base 18: mod_base = OTHER; note = 2-deoxy-2-fluoro ribonucleotide
  modified_base 20: mod_base = OTHER; note = 2-deoxy-2-fluoro ribonucleotide
  modified_base 1: mod_base = OTHER; note = phosphorothioate internucleotide linkage
  modified_base 1..2: mod_base = OTHER; note = phosphorothioate internucleotide linkage
  modified_base 22: mod_base = OTHER; note = phosphorothioate internucleotide linkage
gcagccccttattgttatacga

SEQ ID NO: 1174 - RNA, 21 nt, synthetic construct
  source 1..21: mol_type = other RNA
  modified_base 2: mod_base = OTHER; note = 2'-OMe modified nucleotide
  modified_base 4: mod_base = OTHER; note = 2'-OMe modified nucleotide
  modified_base 6: mod_base = OTHER; note = 2'-OMe modified nucleotide
  modified_base 10: mod_base = OTHER; note = 2'-OMe modified nucleotide
  modified_base 12: mod_base = OTHER; note = 2'-OMe modified nucleotide
  modified_base 14: mod_base = OTHER; note = 2'-OMe modified nucleotide
  modified_base 16: mod_base = OTHER; note = 2'-OMe modified nucleotide
  modified_base 18..21: mod_base = OTHER; note = 2'-OMe modified nucleotide
  modified_base 1: mod_base = OTHER; note = 2-deoxy-2-fluoro ribonucleotide
  modified_base 3: mod_base = OTHER; note = 2-deoxy-2-fluoro ribonucleotide
  modified_base 5: mod_base = OTHER; note = 2-deoxy-2-fluoro ribonucleotide
  modified_base 7..9: mod_base = OTHER; note = 2-deoxy-2-fluoro ribonucleotide
  modified_base 11: mod_base = OTHER; note = 2-deoxy-2-fluoro ribonucleotide
  modified_base 13: mod_base = OTHER; note = 2-deoxy-2-fluoro ribonucleotide
  modified_base 15: mod_base = OTHER; note = 2-deoxy-2-fluoro ribonucleotide
  modified_base 17: mod_base = OTHER; note = 2-deoxy-2-fluoro ribonucleotide
  modified_base 1: mod_base = OTHER; note = phosphorothioate internucleotide linkage
  modified_base 20..21: mod_base = OTHER; note = phosphorothioate internucleotide linkage
gccccttattgttatacgatt

SEQ ID NO: 1175 - RNA, 22 nt, synthetic construct
  source 1..22: mol_type = other RNA
  modified_base 1: mod_base = OTHER; note = 2'-OMe modified nucleotide
  modified_base 3: mod_base = OTHER; note = 2'-OMe modified nucleotide
  modified_base 5: mod_base = OTHER; note = 2'-OMe modified nucleotide
  modified_base 7: mod_base = OTHER; note = 2'-OMe modified nucleotide
  modified_base 11: mod_base = OTHER; note = 2'-OMe modified nucleotide
  modified_base 13: mod_base = OTHER; note = 2'-OMe modified nucleotide
  modified_base 15: mod_base = OTHER; note = 2'-OMe modified nucleotide
  modified_base 17: mod_base = OTHER; note = 2'-OMe modified nucleotide
  modified_base 19..22: mod_base = OTHER; note = 2'-OMe modified nucleotide
  modified_base 2: mod_base = OTHER; note = 2-deoxy-2-fluoro ribonucleotide
  modified_base 4: mod_base = OTHER; note = 2-deoxy-2-fluoro ribonucleotide
  modified_base 6: mod_base = OTHER; note = 2-deoxy-2-fluoro ribonucleotide
  modified_base 8..10: mod_base = OTHER; note = 2-deoxy-2-fluoro ribonucleotide
  modified_base 12: mod_base = OTHER; note = 2-deoxy-2-fluoro ribonucleotide
  modified_base 14: mod_base = OTHER; note = 2-deoxy-2-fluoro ribonucleotide
  modified_base 16: mod_base = OTHER; note = 2-deoxy-2-fluoro ribonucleotide
  modified_base 18: mod_base = OTHER; note = 2-deoxy-2-fluoro ribonucleotide
  modified_base 1: mod_base = OTHER; note = phosphorothioate internucleotide linkage
  modified_base 21..22: mod_base = OTHER; note = phosphorothioate internucleotide linkage
agccccttattgttatacgatt

SEQ ID NO: 1176 - RNA, 21 nt, synthetic construct
  source 1..21: mol_type = other RNA
  modified_base 1..2: mod_base = OTHER; note = 2'-OMe modified nucleotide
  modified_base 4: mod_base = OTHER; note = 2'-OMe modified nucleotide
  modified_base 6: mod_base = OTHER; note = 2'-OMe modified nucleotide
  modified_base 8: mod_base = OTHER; note = 2'-OMe modified nucleotide
  modified_base 12: mod_base = OTHER; note = 2'-OMe modified nucleotide
  modified_base 14: mod_base = OTHER; note = 2'-OMe modified nucleotide
  modified_base 16: mod_base = OTHER; note = 2'-OMe modified nucleotide
  modified_base 18: mod_base = OTHER; note = 2'-OMe modified nucleotide
  modified_base 20..21: mod_base = OTHER; note = 2'-OMe modified nucleotide
  modified_base 3: mod_base = OTHER; note = 2-deoxy-2-fluoro ribonucleotide
  modified_base 5: mod_base = OTHER; note = 2-deoxy-2-fluoro ribonucleotide
  modified_base 7: mod_base = OTHER; note = 2-deoxy-2-fluoro ribonucleotide
  modified_base 9..11: mod_base = OTHER; note = 2-deoxy-2-fluoro ribonucleotide
  modified_base 13: mod_base = OTHER; note = 2-deoxy-2-fluoro ribonucleotide
  modified_base 15: mod_base = OTHER; note = 2-deoxy-2-fluoro ribonucleotide
  modified_base 17: mod_base = OTHER; note = 2-deoxy-2-fluoro ribonucleotide
  modified_base 19: mod_base = OTHER; note = 2-deoxy-2-fluoro ribonucleotide
  modified_base 1: mod_base = OTHER; note = phosphorothioate internucleotide linkage
  modified_base 1..2: mod_base = OTHER; note = phosphorothioate internucleotide linkage
  modified_base 21: mod_base = OTHER; note = phosphorothioate internucleotide linkage
aagccccttattgttatacga

SEQ ID NO: 1177 - RNA, 23 nt, synthetic construct
  source 1..23: mol_type = other RNA
  modified_base 1..2: mod_base = OTHER; note = 2'-OMe modified nucleotide
  modified_base 4: mod_base = OTHER; note = 2'-OMe modified nucleotide
  modified_base 6: mod_base = OTHER; note = 2'-OMe modified nucleotide
  modified_base 8: mod_base = OTHER; note = 2'-OMe modified nucleotide
  modified_base 12: mod_base = OTHER; note = 2'-OMe modified nucleotide
  modified_base 14: mod_base = OTHER; note = 2'-OMe modified nucleotide
  modified_base 16: mod_base = OTHER; note = 2'-OMe modified nucleotide
  modified_base 18: mod_base = OTHER; note = 2'-OMe modified nucleotide
  modified_base 20..23: mod_base = OTHER; note = 2'-OMe modified nucleotide
  modified_base 3: mod_base = OTHER; note = 2-deoxy-2-fluoro ribonucleotide
  modified_base 5: mod_base = OTHER; note = 2-deoxy-2-fluoro ribonucleotide
  modified_base 7: mod_base = OTHER; note = 2-deoxy-2-fluoro ribonucleotide
  modified_base 9..11: mod_base = OTHER; note = 2-deoxy-2-fluoro ribonucleotide
  modified_base 13: mod_base = OTHER; note = 2-deoxy-2-fluoro ribonucleotide
  modified_base 15: mod_base = OTHER; note = 2-deoxy-2-fluoro ribonucleotide
  modified_base 17: mod_base = OTHER; note = 2-deoxy-2-fluoro ribonucleotide
  modified_base 19: mod_base = OTHER; note = 2-deoxy-2-fluoro ribonucleotide
  modified_base 1: mod_base = OTHER; note = phosphorothioate internucleotide linkage
  modified_base 1..2: mod_base = OTHER; note = phosphorothioate internucleotide linkage
  modified_base 22..23: mod_base = OTHER; note = phosphorothioate internucleotide linkage
aagccccttattgttatacgatt

SEQ ID NO: 1178 - RNA, 23 nt, synthetic construct
  source 1..23: mol_type = other RNA
  modified_base 21: mod_base = OTHER; note = inverted deoxyribonucleotide
  modified_base 1..2: mod_base = OTHER; note = 2'-OMe modified nucleotide
  modified_base 4: mod_base = OTHER; note = 2'-OMe modified nucleotide
  modified_base 6: mod_base = OTHER; note = 2'-OMe modified nucleotide
  modified_base 8: mod_base = OTHER; note = 2'-OMe modified nucleotide
  modified_base 12: mod_base = OTHER; note = 2'-OMe modified nucleotide
  modified_base 14: mod_base = OTHER; note = 2'-OMe modified nucleotide
  modified_base 16: mod_base = OTHER; note = 2'-OMe modified nucleotide
  modified_base 18: mod_base = OTHER; note = 2'-OMe modified nucleotide
  modified_base 20: mod_base = OTHER; note = 2'-OMe modified nucleotide
  modified_base 22..23: mod_base = OTHER; note = 2'-OMe modified nucleotide
  modified_base 3: mod_base = OTHER; note = 2-deoxy-2-fluoro ribonucleotide
  modified_base 5: mod_base = OTHER; note = 2-deoxy-2-fluoro ribonucleotide
  modified_base 7: mod_base = OTHER; note = 2-deoxy-2-fluoro ribonucleotide
  modified_base 9..11: mod_base = OTHER; note = 2-deoxy-2-fluoro ribonucleotide
  modified_base 13: mod_base = OTHER; note = 2-deoxy-2-fluoro ribonucleotide
  modified_base 15: mod_base = OTHER; note = 2-deoxy-2-fluoro ribonucleotide
  modified_base 17: mod_base = OTHER; note = 2-deoxy-2-fluoro ribonucleotide
  modified_base 19: mod_base = OTHER; note = 2-deoxy-2-fluoro ribonucleotide
  modified_base 1: mod_base = OTHER; note = phosphorothioate internucleotide linkage
  modified_base 1..2: mod_base = OTHER; note = phosphorothioate internucleotide linkage
  modified_base 22..23: mod_base = OTHER; note = phosphorothioate internucleotide linkage
aagccccttattgttatacgatt

SEQ ID NO: 1179 - RNA, 26 nt, synthetic construct
  source 1..26: mol_type = other RNA
  modified_base 26: mod_base = OTHER; note = inverted deoxyribonucleotide
  modified_base 1..13: mod_base = OTHER; note = 2'-OMe modified nucleotide
  modified_base 17..25: mod_base = OTHER; note = 2'-OMe modified nucleotide
  modified_base 14..16: mod_base = OTHER; note = 2-deoxy-2-fluoro ribonucleotide
  modified_base 5..6: mod_base = OTHER; note = phosphorothioate internucleotide linkage
  modified_base 6..7: mod_base = OTHER; note = phosphorothioate internucleotide linkage
tatatagttatcgaggctcattctca

SEQ ID NO: 1180 - RNA, 24 nt, synthetic construct
  source 1..24: mol_type = other RNA
  modified_base 24: mod_base = OTHER; note = inverted deoxyribonucleotide
  modified_base 1..11: mod_base = OTHER; note = 2'-OMe modified nucleotide
  modified_base 15..23: mod_base = OTHER; note = 2'-OMe modified nucleotide
  modified_base 12..14: mod_base = OTHER; note = 2-deoxy-2-fluoro ribonucleotide
  modified_base 3..4: mod_base = OTHER; note = phosphorothioate internucleotide linkage
  modified_base 4..5: mod_base = OTHER; note = phosphorothioate internucleotide linkage
  modified_base 23..24: mod_base = OTHER; note = phosphorothioate internucleotide linkage
tatcagccccttattgttatacga

SEQ ID NO: 1181 - RNA, 24 nt, synthetic construct
  source 1..24: mol_type = other RNA
  modified_base 24: mod_base = OTHER; note = inverted deoxyribonucleotide
  modified_base 1..11: mod_base = OTHER; note = 2'-OMe modified nucleotide
  modified_base 15..23: mod_base = OTHER; note = 2'-OMe modified nucleotide
  modified_base 12..14: mod_base = OTHER; note = 2-deoxy-2-fluoro ribonucleotide
  modified_base 3..4: mod_base = OTHER; note = phosphorothioate internucleotide linkage
  modified_base 4..5: mod_base = OTHER; note = phosphorothioate internucleotide linkage
  modified_base 23..24: mod_base = OTHER; note = phosphorothioate internucleotide linkage
tagcagccccttattgttatacga

SEQ ID NO: 1182 - RNA, 24 nt, synthetic construct
  source 1..24: mol_type = other RNA
  modified_base 24: mod_base = OTHER; note = inverted deoxyribonucleotide
  modified_base 1..11: mod_base = OTHER; note = 2'-OMe modified nucleotide
  modified_base 15..23: mod_base = OTHER; note = 2'-OMe modified nucleotide
  modified_base 12..14: mod_base = OTHER; note = 2-deoxy-2-fluoro ribonucleotide
  modified_base 23..24: mod_base = OTHER; note = phosphorothioate internucleotide linkage
tatcagccccttattgttatacga

SEQ ID NO: 1183 - RNA, 22 nt, synthetic construct
  source 1..22: mol_type = other RNA
  modified_base 22: mod_base = OTHER; note = inverted deoxyribonucleotide
  modified_base 1..9: mod_base = OTHER; note = 2'-OMe modified nucleotide
  modified_base 13..21: mod_base = OTHER; note = 2'-OMe modified nucleotide
  modified_base 10..12: mod_base = OTHER; note = 2-deoxy-2-fluoro ribonucleotide
  modified_base 1: mod_base = OTHER; note = phosphorothioate internucleotide linkage
  modified_base 1..2: mod_base = OTHER; note = phosphorothioate internucleotide linkage
  modified_base 21..22: mod_base = OTHER; note = phosphorothioate internucleotide linkage
gcagccccttattgttatacga

SEQ ID NO: 1184 - RNA, 22 nt, synthetic construct
  source 1..22: mol_type = other RNA
  modified_base 1..9: mod_base = OTHER; note = 2'-OMe modified nucleotide
  modified_base 13..22: mod_base = OTHER; note = 2'-OMe modified nucleotide
  modified_base 10..12: mod_base = OTHER; note = 2-deoxy-2-fluoro ribonucleotide
  modified_base 1: mod_base = OTHER; note = phosphorothioate internucleotide linkage
  modified_base 1..2: mod_base = OTHER; note = phosphorothioate internucleotide linkage
  modified_base 21..22: mod_base = OTHER; note = phosphorothioate internucleotide linkage
gcagccccttattgttatacga

SEQ ID NO: 1185 - RNA, 26 nt, synthetic construct
  source 1..26: mol_type = other RNA
  modified_base 26: mod_base = OTHER; note = inverted deoxyribonucleotide
  modified_base 1..13: mod_base = OTHER; note = 2'-OMe modified nucleotide
  modified_base 17..25: mod_base = OTHER; note = 2'-OMe modified nucleotide
  modified_base 14..16: mod_base = OTHER; note = 2-deoxy-2-fluoro ribonucleotide
  modified_base 6..7: mod_base = OTHER; note = phosphorothioate internucleotide linkage
ataagagttatcgaggctcattctca

SEQ ID NO: 1186 - RNA, 26 nt, synthetic construct
  source 1..26: mol_type = other RNA
  modified_base 26: mod_base = OTHER; note = inverted deoxyribonucleotide
  modified_base 1..13: mod_base = OTHER; note = 2'-OMe modified nucleotide
  modified_base 17..25: mod_base = OTHER; note = 2'-OMe modified nucleotide
  modified_base 14..16: mod_base = OTHER; note = 2-deoxy-2-fluoro ribonucleotide
  modified_base 5..6: mod_base = OTHER; note = phosphorothioate internucleotide linkage
  modified_base 6..7: mod_base = OTHER; note = phosphorothioate internucleotide linkage
ataagagttatcgaggctcattctca

SEQ ID NO: 1187 - RNA, 26 nt, synthetic construct
  source 1..26: mol_type = other RNA
  modified_base 26: mod_base = OTHER; note = inverted deoxyribonucleotide
  modified_base 1..13: mod_base = OTHER; note = 2'-OMe modified nucleotide
  modified_base 17..25: mod_base = OTHER; note = 2'-OMe modified nucleotide
  modified_base 14..16: mod_base = OTHER; note = 2-deoxy-2-fluoro ribonucleotide
  modified_base 6..7: mod_base = OTHER; note = phosphorothioate internucleotide linkage
ataggcagccccttattgttatacga

SEQ ID NO: 1188 - RNA, 26 nt, synthetic construct
  source 1..26: mol_type = other RNA
  modified_base 26: mod_base = OTHER; note = inverted deoxyribonucleotide
  modified_base 1..13: mod_base = OTHER; note = 2'-OMe modified nucleotide
  modified_base 17..25: mod_base = OTHER; note = 2'-OMe modified nucleotide
  modified_base 14..16: mod_base = OTHER; note = 2-deoxy-2-fluoro ribonucleotide
  modified_base 5..6: mod_base = OTHER; note = phosphorothioate internucleotide linkage
  modified_base 6..7: mod_base = OTHER; note = phosphorothioate internucleotide linkage
ataggcagccccttattgttatacga

SEQ ID NO: 1189 - RNA, 21 nt, synthetic construct
  source 1..21: mol_type = other RNA
  modified_base 21: mod_base = OTHER; note = inverted deoxyribonucleotide
  modified_base 1..8: mod_base = OTHER; note = 2'-OMe modified nucleotide
  modified_base 12..20: mod_base = OTHER; note = 2'-OMe modified nucleotide
  modified_base 9..11: mod_base = OTHER; note = 2-deoxy-2-fluoro ribonucleotide
  modified_base 1: mod_base = OTHER; note = phosphorothioate internucleotide linkage
  modified_base 1..2: mod_base = OTHER; note = phosphorothioate internucleotide linkage
  modified_base 20..21: mod_base = OTHER; note = phosphorothioate internucleotide linkage
cagccccttattgttatacga

SEQ ID NO: 1190 - RNA, 21 nt, synthetic construct
  source 1..21: mol_type = other RNA
  modified_base 21: mod_base = OTHER; note = inverted deoxyribonucleotide
  modified_base 1..8: mod_base = OTHER; note = 2'-OMe modified nucleotide
  modified_base 12..20: mod_base = OTHER; note = 2'-OMe modified nucleotide
  modified_base 9..11: mod_base = OTHER; note = 2-deoxy-2-fluoro ribonucleotide
  modified_base 1: mod_base = OTHER; note = phosphorothioate internucleotide linkage
  modified_base 1..2: mod_base = OTHER; note = phosphorothioate internucleotide linkage
  modified_base 20..21: mod_base = OTHER; note = phosphorothioate internucleotide linkage
cagccccttattgttatacga

SEQ ID NO: 1191 - RNA, 21 nt, synthetic construct
  source 1..21: mol_type = other RNA
  modified_base 1..6: mod_base = OTHER; note = 2'-OMe modified nucleotide
  modified_base 10..21: mod_base = OTHER; note = 2'-OMe modified nucleotide
  modified_base 7..9: mod_base = OTHER; note = 2-deoxy-2-fluoro ribonucleotide
  modified_base 1: mod_base = OTHER; note = phosphorothioate internucleotide linkage
  modified_base 1..2: mod_base = OTHER; note = phosphorothioate internucleotide linkage
  modified_base 21: mod_base = OTHER; note = phosphorothioate internucleotide linkage
gccccttattgttatacgatt

SEQ ID NO: 1192 - RNA, 21 nt, synthetic construct
  source 1..21: mol_type = other RNA
  modified_base 1..6: mod_base = OTHER; note = 2'-OMe modified nucleotide
  modified_base 10..21: mod_base = OTHER; note = 2'-OMe modified nucleotide
  modified_base 7..9: mod_base = OTHER; note = 2-deoxy-2-fluoro ribonucleotide
  modified_base 1: mod_base = OTHER; note = phosphorothioate internucleotide linkage
  modified_base 1..2: mod_base = OTHER; note = phosphorothioate internucleotide linkage
  modified_base 21: mod_base = OTHER; note = phosphorothioate internucleotide linkage
gccccttattgttatacgatt

SEQ ID NO: 1193 - RNA, 21 nt, synthetic construct
  source 1..21: mol_type = other RNA
  modified_base 2..6: mod_base = OTHER; note = 2'-OMe modified nucleotide
  modified_base 10..21: mod_base = OTHER; note = 2'-OMe modified nucleotide
  modified_base 1: mod_base = OTHER; note = 2-deoxy-2-fluoro ribonucleotide
  modified_base 7..9: mod_base = OTHER; note = 2-deoxy-2-fluoro ribonucleotide
  modified_base 1: mod_base = OTHER; note = phosphorothioate internucleotide linkage
  modified_base 1..2: mod_base = OTHER; note = phosphorothioate internucleotide linkage
  modified_base 21: mod_base = OTHER; note = phosphorothioate internucleotide linkage
gccccttattgttatacgatt

SEQ ID NO: 1194 - RNA, 21 nt, synthetic construct
  source 1..21: mol_type = other RNA
  modified_base 2: mod_base = OTHER; note = 2'-OMe modified nucleotide
  modified_base 4: mod_base = OTHER; note = 2'-OMe modified nucleotide
  modified_base 6: mod_base = OTHER; note = 2'-OMe modified nucleotide
  modified_base 10: mod_base = OTHER; note = 2'-OMe modified nucleotide
  modified_base 12: mod_base = OTHER; note = 2'-OMe modified nucleotide
  modified_base 14: mod_base = OTHER; note = 2'-OMe modified nucleotide
  modified_base 16: mod_base = OTHER; note = 2'-OMe modified nucleotide
  modified_base 18..21: mod_base = OTHER; note = 2'-OMe modified nucleotide
  modified_base 1: mod_base = OTHER; note = 2-deoxy-2-fluoro ribonucleotide
  modified_base 3: mod_base = OTHER; note = 2-deoxy-2-fluoro ribonucleotide
  modified_base 5: mod_base = OTHER; note = 2-deoxy-2-fluoro ribonucleotide
  modified_base 7..9: mod_base = OTHER; note = 2-deoxy-2-fluoro ribonucleotide
  modified_base 11: mod_base = OTHER; note = 2-deoxy-2-fluoro ribonucleotide
  modified_base 13: mod_base = OTHER; note = 2-deoxy-2-fluoro ribonucleotide
  modified_base 15: mod_base = OTHER; note = 2-deoxy-2-fluoro ribonucleotide
  modified_base 17: mod_base = OTHER; note = 2-deoxy-2-fluoro ribonucleotide
  modified_base 1: mod_base = OTHER; note = phosphorothioate internucleotide linkage
  modified_base 1..2: mod_base = OTHER; note = phosphorothioate internucleotide linkage
  modified_base 21: mod_base = OTHER; note = phosphorothioate internucleotide linkage
gccccttattgttatacgatt

SEQ ID NO: 1195 - RNA, 26 nt, synthetic construct
  source 1..26: mol_type = other RNA
  modified_base 26: mod_base = OTHER; note = inverted deoxyribonucleotide
  modified_base 13: mod_base = OTHER; note = NOTA nucleoside
  modified_base 1..12: mod_base = OTHER; note = 2'-OMe modified nucleotide
  modified_base 17..25: mod_base = OTHER; note = 2'-OMe modified nucleotide
  modified_base 14..16: mod_base = OTHER; note = 2-deoxy-2-fluoro ribonucleotide
  modified_base 5..6: mod_base = OTHER; note = phosphorothioate internucleotide linkage
  modified_base 6..7: mod_base = OTHER; note = phosphorothioate internucleotide linkage
  modified_base 13: mod_base = OTHER; note = Thymine
tatatcagccccttattgttatacga

SEQ ID NO: 1196 - RNA, 21 nt, synthetic construct
  source 1..21: mol_type = other RNA
  modified_base 6: mod_base = OTHER; note = NOTA nucleoside
  modified_base 2: mod_base = OTHER; note = 2'-OMe modified nucleotide
  modified_base 4: mod_base = OTHER; note = 2'-OMe modified nucleotide
  modified_base 10: mod_base = OTHER; note = 2'-OMe modified nucleotide
  modified_base 12: mod_base = OTHER; note = 2'-OMe modified nucleotide
  modified_base 14: mod_base = OTHER; note = 2'-OMe modified nucleotide
  modified_base 16: mod_base = OTHER; note = 2'-OMe modified nucleotide
  modified_base 18..21: mod_base = OTHER; note = 2'-OMe modified nucleotide
  modified_base 1: mod_base = OTHER; note = 2-deoxy-2-fluoro ribonucleotide
  modified_base 3: mod_base = OTHER; note = 2-deoxy-2-fluoro ribonucleotide
  modified_base 5: mod_base = OTHER; note = 2-deoxy-2-fluoro ribonucleotide
  modified_base 7..9: mod_base = OTHER; note = 2-deoxy-2-fluoro ribonucleotide
  modified_base 11: mod_base = OTHER; note = 2-deoxy-2-fluoro ribonucleotide
  modified_base 13: mod_base = OTHER; note = 2-deoxy-2-fluoro ribonucleotide
  modified_base 15: mod_base = OTHER; note = 2-deoxy-2-fluoro ribonucleotide
  modified_base 17: mod_base = OTHER; note = 2-deoxy-2-fluoro ribonucleotide
  modified_base 20..21: mod_base = OTHER; note = phosphorothioate internucleotide linkage
  modified_base 6: mod_base = OTHER; note = Thymine
gccccttattgttatacgatt

SEQ ID NO: 1197 - RNA, 26 nt, synthetic construct
  source 1..26: mol_type = other RNA
  modified_base 1: mod_base = OTHER; note = 2'-OMe modified nucleotide
  modified_base 3: mod_base = OTHER; note = 2'-OMe modified nucleotide
  modified_base 5: mod_base = OTHER; note = 2'-OMe modified nucleotide
  modified_base 7: mod_base = OTHER; note = 2'-OMe modified nucleotide
  modified_base 9: mod_base = OTHER; note = 2'-OMe modified nucleotide
  modified_base 11: mod_base = OTHER; note = 2'-OMe modified nucleotide
  modified_base 13: mod_base = OTHER; note = 2'-OMe modified nucleotide
  modified_base 17..19: mod_base = OTHER; note = 2'-OMe modified nucleotide
  modified_base 21..26: mod_base = OTHER; note = 2'-OMe modified nucleotide
  modified_base 6: mod_base = OTHER; note = 2-deoxy-2-fluoro ribonucleotide
  modified_base 8: mod_base = OTHER; note = 2-deoxy-2-fluoro ribonucleotide
  modified_base 10: mod_base = OTHER; note = 2-deoxy-2-fluoro ribonucleotide
  modified_base 12: mod_base = OTHER; note = 2-deoxy-2-fluoro ribonucleotide
  modified_base 14..16: mod_base = OTHER; note = 2-deoxy-2-fluoro ribonucleotide
  modified_base 20: mod_base = OTHER; note = 2-deoxy-2-fluoro ribonucleotide
  modified_base 5..6: mod_base = OTHER; note = phosphorothioate internucleotide linkage
  modified_base 6..7: mod_base = OTHER; note = phosphorothioate internucleotide linkage
tatatagttatcgaggctcattctca

SEQ ID NO: 1198 - RNA, 26 nt, synthetic construct
  source 1..26: mol_type = other RNA
  modified_base 1: mod_base = OTHER; note = 2'-OMe modified nucleotide
  modified_base 3: mod_base = OTHER; note = 2'-OMe modified nucleotide
  modified_base 5: mod_base = OTHER; note = 2'-OMe modified nucleotide
  modified_base 7: mod_base = OTHER; note = 2'-OMe modified nucleotide
  modified_base 9: mod_base = OTHER; note = 2'-OMe modified nucleotide
  modified_base 11: mod_base = OTHER; note = 2'-OMe modified nucleotide
  modified_base 13: mod_base = OTHER; note = 2'-OMe modified nucleotide
  modified_base 17..21: mod_base = OTHER; note = 2'-OMe modified nucleotide
  modified_base 23..26: mod_base = OTHER; note = 2'-OMe modified nucleotide
  modified_base 6: mod_base = OTHER; note = 2-deoxy-2-fluoro ribonucleotide
  modified_base 8: mod_base = OTHER; note = 2-deoxy-2-fluoro ribonucleotide
  modified_base 10: mod_base = OTHER; note = 2-deoxy-2-fluoro ribonucleotide
  modified_base 12: mod_base = OTHER; note = 2-deoxy-2-fluoro ribonucleotide
  modified_base 14..16: mod_base = OTHER; note = 2-deoxy-2-fluoro ribonucleotide
  modified_base 22: mod_base = OTHER; note = 2-deoxy-2-fluoro ribonucleotide
  modified_base 5..6: mod_base = OTHER; note = phosphorothioate internucleotide linkage
  modified_base 6..7: mod_base = OTHER; note = phosphorothioate internucleotide linkage
tatatagttatcgaggctcattctca

SEQ ID NO: 1199 - RNA, 26 nt, synthetic construct
  source 1..26: mol_type = other RNA
  modified_base 1: mod_base = OTHER; note = 2'-OMe modified nucleotide
  modified_base 3: mod_base = OTHER; note = 2'-OMe modified nucleotide
  modified_base 5: mod_base = OTHER; note = 2'-OMe modified nucleotide
  modified_base 7: mod_base = OTHER; note = 2'-OMe modified nucleotide
  modified_base 9: mod_base = OTHER; note = 2'-OMe modified nucleotide
  modified_base 11: mod_base = OTHER; note = 2'-OMe modified nucleotide
  modified_base 13: mod_base = OTHER; note = 2'-OMe modified nucleotide
  modified_base 17..23: mod_base = OTHER; note = 2'-OMe modified nucleotide
  modified_base 25..26: mod_base = OTHER; note = 2'-OMe modified nucleotide
  modified_base 6: mod_base = OTHER; note = 2-deoxy-2-fluoro ribonucleotide
  modified_base 8: mod_base = OTHER; note = 2-deoxy-2-fluoro ribonucleotide
  modified_base 10: mod_base = OTHER; note = 2-deoxy-2-fluoro ribonucleotide
  modified_base 12: mod_base = OTHER; note = 2-deoxy-2-fluoro ribonucleotide
  modified_base 14..16: mod_base = OTHER; note = 2-deoxy-2-fluoro ribonucleotide
  modified_base 24: mod_base = OTHER; note = 2-deoxy-2-fluoro ribonucleotide
  modified_base 5..6: mod_base = OTHER; note = phosphorothioate internucleotide linkage
  modified_base 6..7: mod_base = OTHER; note = phosphorothioate internucleotide linkage
tatatagttatcgaggctcattctca

SEQ ID NO: 1200 - RNA, 26 nt, synthetic construct
  source 1..26: mol_type = other RNA
  modified_base 1: mod_base = OTHER; note = 2'-OMe modified nucleotide
  modified_base 3: mod_base = OTHER; note = 2'-OMe modified nucleotide
  modified_base 5: mod_base = OTHER; note = 2'-OMe modified nucleotide
  modified_base 7: mod_base = OTHER; note = 2'-OMe modified nucleotide
  modified_base 9: mod_base = OTHER; note = 2'-OMe modified nucleotide
  modified_base 11: mod_base = OTHER; note = 2'-OMe modified nucleotide
  modified_base 13: mod_base = OTHER; note = 2'-OMe modified nucleotide
  modified_base 17..25: mod_base = OTHER; note = 2'-OMe modified nucleotide
  modified_base 6: mod_base = OTHER; note = 2-deoxy-2-fluoro ribonucleotide
  modified_base 8: mod_base = OTHER; note = 2-deoxy-2-fluoro ribonucleotide
  modified_base 10: mod_base = OTHER; note = 2-deoxy-2-fluoro ribonucleotide
  modified_base 12: mod_base = OTHER; note = 2-deoxy-2-fluoro ribonucleotide
  modified_base 14..16: mod_base = OTHER; note = 2-deoxy-2-fluoro ribonucleotide
  modified_base 26: mod_base = OTHER; note = 2-deoxy-2-fluoro ribonucleotide
  modified_base 5..6: mod_base = OTHER; note = phosphorothioate internucleotide linkage
  modified_base 6..7: mod_base = OTHER; note = phosphorothioate internucleotide linkage
tatatagttatcgaggctcattctca

SEQ ID NO: 1201 - RNA, 26 nt, synthetic construct
  source 1..26: mol_type = other RNA
  modified_base 1: mod_base = OTHER; note = 2'-OMe modified nucleotide
  modified_base 3: mod_base = OTHER; note = 2'-OMe modified nucleotide
  modified_base 5: mod_base = OTHER; note = 2'-OMe modified nucleotide
  modified_base 7: mod_base = OTHER; note = 2'-OMe modified nucleotide
  modified_base 9: mod_base = OTHER; note = 2'-OMe modified nucleotide
  modified_base 11: mod_base = OTHER; note = 2'-OMe modified nucleotide
  modified_base 13: mod_base = OTHER; note = 2'-OMe modified nucleotide
  modified_base 15: mod_base = OTHER; note = 2'-OMe modified nucleotide
  modified_base 17: mod_base = OTHER; note = 2'-OMe modified nucleotide
  modified_base 19..25: mod_base = OTHER; note = 2'-OMe modified nucleotide
  modified_base 6: mod_base = OTHER; note = 2-deoxy-2-fluoro ribonucleotide
  modified_base 8: mod_base = OTHER; note = 2-deoxy-2-fluoro ribonucleotide
  modified_base 10: mod_base = OTHER; note = 2-deoxy-2-fluoro ribonucleotide
  modified_base 12: mod_base = OTHER; note = 2-deoxy-2-fluoro ribonucleotide
  modified_base 14: mod_base = OTHER; note = 2-deoxy-2-fluoro ribonucleotide
  modified_base 16: mod_base = OTHER; note = 2-deoxy-2-fluoro ribonucleotide
  modified_base 18: mod_base = OTHER; note = 2-deoxy-2-fluoro ribonucleotide
  modified_base 26: mod_base = OTHER; note = 2-deoxy-2-fluoro ribonucleotide
  modified_base 5..6: mod_base = OTHER; note = phosphorothioate internucleotide linkage
  modified_base 6..7: mod_base = OTHER; note = phosphorothioate internucleotide linkage
tatatagttatcgaggctcattctca

SEQ ID NO: 1202 - RNA, 26 nt, synthetic construct
  source 1..26: mol_type = other RNA
  modified_base 1: mod_base = OTHER; note = 2'-OMe modified nucleotide
  modified_base 3: mod_base = OTHER; note = 2'-OMe modified nucleotide
  modified_base 5: mod_base = OTHER; note = 2'-OMe modified nucleotide
  modified_base 7: mod_base = OTHER; note = 2'-OMe modified nucleotide
  modified_base 9: mod_base = OTHER; note = 2'-OMe modified nucleotide
  modified_base 11: mod_base = OTHER; note = 2'-OMe modified nucleotide
  modified_base 13: mod_base = OTHER; note = 2'-OMe modified nucleotide
  modified_base 15: mod_base = OTHER; note = 2'-OMe modified nucleotide
  modified_base 17..19: mod_base = OTHER; note = 2'-OMe modified nucleotide
  modified_base 21..25: mod_base = OTHER; note = 2'-OMe modified nucleotide
  modified_base 6: mod_base = OTHER; note = 2-deoxy-2-fluoro ribonucleotide
  modified_base 8: mod_base = OTHER; note = 2-deoxy-2-fluoro ribonucleotide
  modified_base 10: mod_base = OTHER; note = 2-deoxy-2-fluoro ribonucleotide
  modified_base 12: mod_base = OTHER; note = 2-deoxy-2-fluoro ribonucleotide
  modified_base 14: mod_base = OTHER; note = 2-deoxy-2-fluoro ribonucleotide
  modified_base 16: mod_base = OTHER; note = 2-deoxy-2-fluoro ribonucleotide
  modified_base 20: mod_base = OTHER; note = 2-deoxy-2-fluoro ribonucleotide
  modified_base 26: mod_base = OTHER; note = 2-deoxy-2-fluoro ribonucleotide
  modified_base 5..6: mod_base = OTHER; note = phosphorothioate internucleotide linkage
  modified_base 6..7: mod_base = OTHER; note = phosphorothioate internucleotide linkage
tatatagttatcgaggctcattctca

SEQ ID NO: 1203 - RNA, 26 nt, synthetic construct
  source 1..26: mol_type = other RNA
  modified_base 1: mod_base = OTHER; note = 2'-OMe modified nucleotide
  modified_base 3: mod_base = OTHER; note = 2'-OMe modified nucleotide
  modified_base 5: mod_base = OTHER; note = 2'-OMe modified nucleotide
  modified_base 7: mod_base = OTHER; note = 2'-OMe modified nucleotide
  modified_base 9: mod_base = OTHER; note = 2'-OMe modified nucleotide
  modified_base 11: mod_base = OTHER; note = 2'-OMe modified nucleotide
  modified_base 13: mod_base = OTHER; note = 2'-OMe modified nucleotide
  modified_base 15: mod_base = OTHER; note = 2'-OMe modified nucleotide
  modified_base 17..21: mod_base = OTHER; note = 2'-OMe modified nucleotide
  modified_base 23..25: mod_base = OTHER; note = 2'-OMe modified nucleotide
  modified_base 6: mod_base = OTHER; note = 2-deoxy-2-fluoro ribonucleotide
  modified_base 8: mod_base = OTHER; note = 2-deoxy-2-fluoro ribonucleotide
  modified_base 10: mod_base = OTHER; note = 2-deoxy-2-fluoro ribonucleotide
  modified_base 12: mod_base = OTHER; note = 2-deoxy-2-fluoro ribonucleotide
  modified_base 14: mod_base = OTHER; note = 2-deoxy-2-fluoro ribonucleotide
  modified_base 16: mod_base = OTHER; note = 2-deoxy-2-fluoro ribonucleotide
  modified_base 22: mod_base = OTHER; note = 2-deoxy-2-fluoro ribonucleotide
  modified_base 26: mod_base = OTHER; note = 2-deoxy-2-fluoro ribonucleotide
  modified_base 5..6: mod_base = OTHER; note = phosphorothioate internucleotide linkage
  modified_base 6..7: mod_base = OTHER; note = phosphorothioate internucleotide linkage
tatatagttatcgaggctcattctca

SEQ ID NO: 1204 - RNA, 26 nt, synthetic construct
  source 1..26: mol_type = other RNA
  modified_base 1: mod_base = OTHER; note = 2'-OMe modified nucleotide
  modified_base 3: mod_base = OTHER; note = 2'-OMe modified nucleotide
  modified_base 5: mod_base = OTHER; note = 2'-OMe modified nucleotide
  modified_base 7: mod_base = OTHER; note = 2'-OMe modified nucleotide
  modified_base 9: mod_base = OTHER; note = 2'-OMe modified nucleotide
  modified_base 11: mod_base = OTHER; note = 2'-OMe modified nucleotide
  modified_base 13: mod_base = OTHER; note = 2'-OMe modified nucleotide
  modified_base 15: mod_base = OTHER; note = 2'-OMe modified nucleotide
  modified_base 17..23: mod_base = OTHER; note = 2'-OMe modified nucleotide
  modified_base 25: mod_base = OTHER; note = 2'-OMe modified nucleotide
  modified_base 6: mod_base = OTHER; note = 2-deoxy-2-fluoro ribonucleotide
  modified_base 8: mod_base = OTHER; note = 2-deoxy-2-fluoro ribonucleotide
  modified_base 10: mod_base = OTHER; note = 2-deoxy-2-fluoro ribonucleotide
  modified_base 12: mod_base = OTHER; note = 2-deoxy-2-fluoro ribonucleotide
  modified_base 14: mod_base = OTHER; note = 2-deoxy-2-fluoro ribonucleotide
  modified_base 16: mod_base = OTHER; note = 2-deoxy-2-fluoro ribonucleotide
  modified_base 24: mod_base = OTHER; note = 2-deoxy-2-fluoro ribonucleotide
  modified_base 26: mod_base = OTHER; note = 2-deoxy-2-fluoro ribonucleotide
  modified_base 5..6: mod_base = OTHER; note = phosphorothioate internucleotide linkage
  modified_base 6..7: mod_base = OTHER; note = phosphorothioate internucleotide linkage
tatatagttatcgaggctcattctca

SEQ ID NO: 1205 - RNA, 26 nt, synthetic construct
  source 1..26: mol_type = other RNA
  modified_base 1: mod_base = OTHER; note = 2'-OMe modified nucleotide
  modified_base 3: mod_base = OTHER; note = 2'-OMe modified nucleotide
  modified_base 5: mod_base = OTHER; note = 2'-OMe modified nucleotide
  modified_base 7: mod_base = OTHER; note = 2'-OMe modified nucleotide
  modified_base 9: mod_base = OTHER; note = 2'-OMe modified nucleotide
  modified_base 11: mod_base = OTHER; note = 2'-OMe modified nucleotide
  modified_base 13: mod_base = OTHER; note = 2'-OMe modified nucleotide
  modified_base 15: mod_base = OTHER; note = 2'-OMe modified nucleotide
  modified_base 17..25: mod_base = OTHER; note = 2'-OMe modified nucleotide
  modified_base 6: mod_base = OTHER; note = 2-deoxy-2-fluoro ribonucleotide
  modified_base 8: mod_base = OTHER; note = 2-deoxy-2-fluoro ribonucleotide
  modified_base 10: mod_base = OTHER; note = 2-deoxy-2-fluoro ribonucleotide
  modified_base 12: mod_base = OTHER; note = 2-deoxy-2-fluoro ribonucleotide
  modified_base 14: mod_base = OTHER; note = 2-deoxy-2-fluoro ribonucleotide
  modified_base 16: mod_base = OTHER; note = 2-deoxy-2-fluoro ribonucleotide
  modified_base 26: mod_base = OTHER; note = 2-deoxy-2-fluoro ribonucleotide
  modified_base 5..6: mod_base = OTHER; note = phosphorothioate internucleotide linkage
  modified_base 6..7: mod_base = OTHER; note = phosphorothioate internucleotide linkage
tatatagttatcgaggctcattctca

SEQ ID NO: 1206 - RNA, 26 nt, synthetic construct
  source 1..26: mol_type = other RNA
  modified_base 1: mod_base = OTHER; note = 2'-OMe modified nucleotide
  modified_base 3: mod_base = OTHER; note = 2'-OMe modified nucleotide
  modified_base 5: mod_base = OTHER; note = 2'-OMe modified nucleotide
  modified_base 7: mod_base = OTHER; note = 2'-OMe modified nucleotide
  modified_base 9: mod_base = OTHER; note = 2'-OMe modified nucleotide
  modified_base 11: mod_base = OTHER; note = 2'-OMe modified nucleotide
  modified_base 13..14: mod_base = OTHER; note = 2'-OMe modified nucleotide
  modified_base 17..25: mod_base = OTHER; note = 2'-OMe modified nucleotide
  modified_base 6: mod_base = OTHER; note = 2-deoxy-2-fluoro ribonucleotide
  modified_base 8: mod_base = OTHER; note = 2-deoxy-2-fluoro ribonucleotide
  modified_base 10: mod_base = OTHER; note = 2-deoxy-2-fluoro ribonucleotide
  modified_base 12: mod_base = OTHER; note = 2-deoxy-2-fluoro ribonucleotide
  modified_base 15..16: mod_base = OTHER; note = 2-deoxy-2-fluoro ribonucleotide
  modified_base 26: mod_base = OTHER; note = 2-deoxy-2-fluoro ribonucleotide
  modified_base 5..6: mod_base = OTHER; note = phosphorothioate internucleotide linkage
  modified_base 6..7: mod_base = OTHER; note = phosphorothioate internucleotide linkage
tatatagttatcgaggctcattctca

SEQ ID NO: 1207 - RNA, 26 nt, synthetic construct
  source 1..26: mol_type = other RNA
  modified_base 1: mod_base = OTHER; note = 2'-OMe modified nucleotide
  modified_base 3: mod_base = OTHER; note = 2'-OMe modified nucleotide
  modified_base 5: mod_base = OTHER; note = 2'-OMe modified nucleotide
  modified_base 7: mod_base = OTHER; note = 2'-OMe modified nucleotide
  modified_base 9: mod_base = OTHER; note = 2'-OMe modified nucleotide
  modified_base 11: mod_base = OTHER; note = 2'-OMe modified nucleotide
  modified_base 13..15: mod_base = OTHER; note = 2'-OMe modified nucleotide
  modified_base 17: mod_base = OTHER; note = 2'-OMe modified nucleotide
  modified_base 19..25: mod_base = OTHER; note = 2'-OMe modified nucleotide
  modified_base 6: mod_base = OTHER; note = 2-deoxy-2-fluoro ribonucleotide
  modified_base 8: mod_base = OTHER; note = 2-deoxy-2-fluoro ribonucleotide
  modified_base 10: mod_base = OTHER; note = 2-deoxy-2-fluoro ribonucleotide
  modified_base 12: mod_base = OTHER; note = 2-deoxy-2-fluoro ribonucleotide
  modified_base 16: mod_base = OTHER; note = 2-deoxy-2-fluoro ribonucleotide
  modified_base 18: mod_base = OTHER; note = 2-deoxy-2-fluoro ribonucleotide
  modified_base 26: mod_base = OTHER; note = 2-deoxy-2-fluoro ribonucleotide
  modified_base 5..6: mod_base = OTHER; note = phosphorothioate internucleotide linkage
  modified_base 6..7: mod_base = OTHER; note = phosphorothioate internucleotide linkage
tatatagttatcgaggctcattctca

SEQ ID NO: 1208 - RNA, 26 nt, synthetic construct
  source 1..26: mol_type = other RNA
  modified_base 1: mod_base = OTHER; note = 2'-OMe modified nucleotide
  modified_base 3: mod_base = OTHER; note = 2'-OMe modified nucleotide
  modified_base 5: mod_base = OTHER; note = 2'-OMe modified nucleotide
  modified_base 7: mod_base = OTHER; note = 2'-OMe modified nucleotide
  modified_base 9: mod_base = OTHER; note = 2'-OMe modified nucleotide
  modified_base 11: mod_base = OTHER; note = 2'-OMe modified nucleotide
  modified_base 13..15: mod_base = OTHER; note = 2'-OMe modified nucleotide
  modified_base 17..19: mod_base = OTHER; note = 2'-OMe modified nucleotide
  modified_base 21..25: mod_base = OTHER; note = 2'-OMe modified nucleotide
  modified_base 6: mod_base = OTHER; note = 2-deoxy-2-fluoro ribonucleotide
  modified_base 8: mod_base = OTHER; note = 2-deoxy-2-fluoro ribonucleotide
  modified_base 10: mod_base = OTHER; note = 2-deoxy-2-fluoro ribonucleotide
  modified_base 12: mod_base = OTHER; note = 2-deoxy-2-fluoro ribonucleotide
  modified_base 16: mod_base = OTHER; note = 2-deoxy-2-fluoro ribonucleotide
  modified_base 20: mod_base = OTHER; note = 2-deoxy-2-fluoro ribonucleotide
  modified_base 26: mod_base = OTHER; note = 2-deoxy-2-fluoro ribonucleotide
  modified_base 5..6: mod_base = OTHER; note = phosphorothioate internucleotide linkage
  modified_base 6..7: mod_base = OTHER; note = phosphorothioate internucleotide linkage
tatatagttatcgaggctcattctca

SEQ ID NO: 1209 - RNA, 26 nt, synthetic construct
  source 1..26: mol_type = other RNA
  modified_base 1: mod_base = OTHER; note = 2'-OMe modified nucleotide
  modified_base 3: mod_base = OTHER; note = 2'-OMe modified nucleotide
  modified_base 5: mod_base = OTHER; note = 2'-OMe modified nucleotide
  modified_base 7: mod_base = OTHER; note = 2'-OMe modified nucleotide
  modified_base 9: mod_base = OTHER; note = 2'-OMe modified nucleotide
  modified_base 11: mod_base = OTHER; note = 2'-OMe modified nucleotide
  modified_base 13..15: mod_base = OTHER; note = 2'-OMe modified nucleotide
  modified_base 17..21: mod_base = OTHER; note = 2'-OMe modified nucleotide
  modified_base 23..25: mod_base = OTHER; note = 2'-OMe modified nucleotide
  modified_base 6: mod_base = OTHER; note = 2-deoxy-2-fluoro ribonucleotide
  modified_base 8: mod_base = OTHER; note = 2-deoxy-2-fluoro ribonucleotide
  modified_base 10: mod_base = OTHER; note = 2-deoxy-2-fluoro ribonucleotide
  modified_base 12: mod_base = OTHER; note = 2-deoxy-2-fluoro ribonucleotide
  modified_base 16: mod_base = OTHER; note = 2-deoxy-2-fluoro ribonucleotide
  modified_base 22: mod_base = OTHER; note = 2-deoxy-2-fluoro ribonucleotide
  modified_base 26: mod_base = OTHER; note = 2-deoxy-2-fluoro ribonucleotide
  modified_base 5..6: mod_base = OTHER; note = phosphorothioate internucleotide linkage
  modified_base 6..7: mod_base = OTHER; note = phosphorothioate internucleotide linkage
tatatagttatcgaggctcattctca

SEQ ID NO: 1210 - RNA, 26 nt, synthetic construct
  source 1..26: mol_type = other RNA
  modified_base 1: mod_base = OTHER; note = 2'-OMe modified nucleotide
  modified_base 3: mod_base = OTHER; note = 2'-OMe modified nucleotide
  modified_base 5: mod_base = OTHER; note = 2'-OMe modified nucleotide
  modified_base 7: mod_base = OTHER; note = 2'-OMe modified nucleotide
  modified_base 9: mod_base = OTHER; note = 2'-OMe modified nucleotide
  modified_base 11: mod_base = OTHER; note = 2'-OMe modified nucleotide
  modified_base 13..15: mod_base = OTHER; note = 2'-OMe modified nucleotide
  modified_base 17..23: mod_base = OTHER; note = 2'-OMe modified nucleotide
  modified_base 25: mod_base = OTHER; note = 2'-OMe modified nucleotide
  modified_base 6: mod_base = OTHER; note = 2-deoxy-2-fluoro ribonucleotide
  modified_base 8: mod_base = OTHER; note = 2-deoxy-2-fluoro ribonucleotide
  modified_base 10: mod_base = OTHER; note = 2-deoxy-2-fluoro ribonucleotide
  modified_base 12: mod_base = OTHER; note = 2-deoxy-2-fluoro ribonucleotide
  modified_base 16: mod_base = OTHER; note = 2-deoxy-2-fluoro ribonucleotide
  modified_base 24: mod_base = OTHER; note = 2-deoxy-2-fluoro ribonucleotide
  modified_base 26: mod_base = OTHER; note = 2-deoxy-2-fluoro ribonucleotide
  modified_base 5..6: mod_base = OTHER; note = phosphorothioate internucleotide linkage
  modified_base 6..7: mod_base = OTHER; note = phosphorothioate internucleotide linkage
tatatagttatcgaggctcattctca

SEQ ID NO: 1211 - RNA, 26 nt, synthetic construct
  source 1..26: mol_type = other RNA
  modified_base 1: mod_base = OTHER; note = 2'-OMe modified nucleotide
  modified_base 3: mod_base = OTHER; note = 2'-OMe modified nucleotide
  modified_base 5: mod_base = OTHER; note = 2'-OMe modified nucleotide
  modified_base 7: mod_base = OTHER; note = 2'-OMe modified nucleotide
  modified_base 9: mod_base = OTHER; note = 2'-OMe modified nucleotide
  modified_base 11: mod_base = OTHER; note = 2'-OMe modified nucleotide
  modified_base 13..15: mod_base = OTHER; note = 2'-OMe modified nucleotide
  modified_base 17..21: mod_base = OTHER; note = 2'-OMe modified nucleotide
  modified_base 23: mod_base = OTHER; note = 2'-OMe modified nucleotide
  modified_base 25: mod_base = OTHER; note = 2'-OMe modified nucleotide
  modified_base 6: mod_base = OTHER; note = 2-deoxy-2-fluoro ribonucleotide
  modified_base 8: mod_base = OTHER; note = 2-deoxy-2-fluoro ribonucleotide
  modified_base 10: mod_base = OTHER; note = 2-deoxy-2-fluoro ribonucleotide
  modified_base 12: mod_base = OTHER; note = 2-deoxy-2-fluoro ribonucleotide
  modified_base 16: mod_base = OTHER; note = 2-deoxy-2-fluoro ribonucleotide
  modified_base 22: mod_base = OTHER; note = 2-deoxy-2-fluoro ribonucleotide
  modified_base 24: mod_base = OTHER; note = 2-deoxy-2-fluoro ribonucleotide
  modified_base 26: mod_base = OTHER; note = 2-deoxy-2-fluoro ribonucleotide
  modified_base 5..6: mod_base = OTHER; note = phosphorothioate internucleotide linkage
  modified_base 6..7: mod_base = OTHER; note = phosphorothioate internucleotide linkage
tatatagttatcgaggctcattctca

SEQ ID NO: 1212 - RNA, 26 nt, synthetic construct
  source 1..26: mol_type = other RNA
  modified_base 1: mod_base = OTHER; note = 2'-OMe modified nucleotide
  modified_base 3: mod_base = OTHER; note = 2'-OMe modified nucleotide
  modified_base 5: mod_base = OTHER; note = 2'-OMe modified nucleotide
  modified_base 7: mod_base = OTHER; note = 2'-OMe modified nucleotide
  modified_base 9..11: mod_base = OTHER; note = 2'-OMe modified nucleotide
  modified_base 13: mod_base = OTHER; note = 2'-OMe modified nucleotide
  modified_base 15: mod_base = OTHER; note = 2'-OMe modified nucleotide
  modified_base 17..21: mod_base = OTHER; note = 2'-OMe modified nucleotide
  modified_base 23: mod_base = OTHER; note = 2'-OMe modified nucleotide
  modified_base 25: mod_base = OTHER; note = 2'-OMe modified nucleotide
  modified_base 6: mod_base = OTHER; note = 2-deoxy-2-fluoro ribonucleotide
  modified_base 8: mod_base = OTHER; note = 2-deoxy-2-fluoro ribonucleotide
  modified_base 12: mod_base = OTHER; note = 2-deoxy-2-fluoro ribonucleotide
  modified_base 14: mod_base = OTHER; note = 2-deoxy-2-fluoro ribonucleotide
  modified_base 16: mod_base = OTHER; note = 2-deoxy-2-fluoro ribonucleotide
  modified_base 22: mod_base = OTHER; note = 2-deoxy-2-fluoro ribonucleotide
  modified_base 24: mod_base = OTHER; note = 2-deoxy-2-fluoro ribonucleotide
  modified_base 26: mod_base = OTHER; note = 2-deoxy-2-fluoro ribonucleotide
  modified_base 5..6: mod_base = OTHER; note = phosphorothioate internucleotide linkage
  modified_base 6..7: mod_base = OTHER; note = phosphorothioate internucleotide linkage
tatatagttatcgaggctcattctca

SEQ ID NO: 1213 - RNA, 26 nt, synthetic construct
  source 1..26: mol_type = other RNA
  modified_base 1: mod_base = OTHER; note = 2'-OMe modified nucleotide
  modified_base 3: mod_base = OTHER; note = 2'-OMe modified nucleotide
  modified_base 5: mod_base = OTHER; note = 2'-OMe modified nucleotide
  modified_base 7: mod_base = OTHER; note = 2'-OMe modified nucleotide
  modified_base 9..11: mod_base = OTHER; note = 2'-OMe modified nucleotide
  modified_base 13..14: mod_base = OTHER; note = 2'-OMe modified nucleotide
  modified_base 17..21: mod_base = OTHER; note = 2'-OMe modified nucleotide
  modified_base 23: mod_base = OTHER; note = 2'-OMe modified nucleotide
  modified_base 25: mod_base = OTHER; note = 2'-OMe modified nucleotide
  modified_base 6: mod_base = OTHER; note = 2-deoxy-2-fluoro ribonucleotide
  modified_base 8: mod_base = OTHER; note = 2-deoxy-2-fluoro ribonucleotide
  modified_base 12: mod_base = OTHER; note = 2-deoxy-2-fluoro ribonucleotide
  modified_base 15..16: mod_base = OTHER; note = 2-deoxy-2-fluoro ribonucleotide
  modified_base 22: mod_base = OTHER; note = 2-deoxy-2-fluoro ribonucleotide
  modified_base 24: mod_base = OTHER; note = 2-deoxy-2-fluoro ribonucleotide
  modified_base 26: mod_base = OTHER; note = 2-deoxy-2-fluoro ribonucleotide
  modified_base 5..6: mod_base = OTHER; note = phosphorothioate internucleotide linkage
  modified_base 6..7: mod_base = OTHER; note = phosphorothioate internucleotide linkage
tatatagttatcgaggctcattctca

SEQ ID NO: 1214 - RNA, 26 nt, synthetic construct
  source 1..26: mol_type = other RNA
  modified_base 1: mod_base = OTHER; note = 2'-OMe modified nucleotide
  modified_base 3: mod_base = OTHER; note = 2'-OMe modified nucleotide
  modified_base 5: mod_base = OTHER; note = 2'-OMe modified nucleotide
  modified_base 7: mod_base = OTHER; note = 2'-OMe modified nucleotide
  modified_base 9..11: mod_base = OTHER; note = 2'-OMe modified nucleotide
  modified_base 13..15: mod_base = OTHER; note = 2'-OMe modified nucleotide
  modified_base 17: mod_base = OTHER; note = 2'-OMe modified nucleotide
  modified_base 19..21: mod_base = OTHER; note = 2'-OMe modified nucleotide
  modified_base 23: mod_base = OTHER; note = 2'-OMe modified nucleotide
  modified_base 25: mod_base = OTHER; note = 2'-OMe modified nucleotide
  modified_base 6: mod_base = OTHER; note = 2-deoxy-2-fluoro ribonucleotide
  modified_base 8: mod_base = OTHER; note = 2-deoxy-2-fluoro ribonucleotide
  modified_base 12: mod_base = OTHER; note = 2-deoxy-2-fluoro ribonucleotide
  modified_base 16: mod_base = OTHER; note = 2-deoxy-2-fluoro ribonucleotide
  modified_base 18: mod_base = OTHER; note = 2-deoxy-2-fluoro ribonucleotide
  modified_base 22: mod_base = OTHER; note = 2-deoxy-2-fluoro ribonucleotide
  modified_base 24: mod_base = OTHER; note = 2-deoxy-2-fluoro ribonucleotide
  modified_base 26: mod_base = OTHER; note = 2-deoxy-2-fluoro ribonucleotide
  modified_base 5..6: mod_base = OTHER; note = phosphorothioate internucleotide linkage
  modified_base 6..7: mod_base = OTHER; note = phosphorothioate internucleotide linkage
tatatagttatcgaggctcattctca

SEQ ID NO: 1215 - RNA, 26 nt, synthetic construct
  source 1..26: mol_type = other RNA
  modified_base 1: mod_base = OTHER; note = 2'-OMe modified nucleotide
  modified_base 3: mod_base = OTHER; note = 2'-OMe modified nucleotide
  modified_base 5: mod_base = OTHER; note = 2'-OMe modified nucleotide
  modified_base 7: mod_base = OTHER; note = 2'-OMe modified nucleotide
  modified_base 9..11: mod_base = OTHER; note = 2'-OMe modified nucleotide
  modified_base 13..15: mod_base = OTHER; note = 2'-OMe modified nucleotide
  modified_base 17..19: mod_base = OTHER; note = 2'-OMe modified nucleotide
  modified_base 21: mod_base = OTHER; note = 2'-OMe modified nucleotide
  modified_base 23: mod_base = OTHER; note = 2'-OMe modified nucleotide
  modified_base 25: mod_base = OTHER; note = 2'-OMe modified nucleotide
  modified_base 6: mod_base = OTHER; note = 2-deoxy-2-fluoro ribonucleotide
  modified_base 8: mod_base = OTHER; note = 2-deoxy-2-fluoro ribonucleotide
  modified_base 12: mod_base = OTHER; note = 2-deoxy-2-fluoro ribonucleotide
  modified_base 16: mod_base = OTHER; note = 2-deoxy-2-fluoro ribonucleotide
  modified_base 20: mod_base = OTHER; note = 2-deoxy-2-fluoro ribonucleotide
  modified_base 22: mod_base = OTHER; note = 2-deoxy-2-fluoro ribonucleotide
  modified_base 24: mod_base = OTHER; note = 2-deoxy-2-fluoro ribonucleotide
  modified_base 26: mod_base = OTHER; note = 2-deoxy-2-fluoro ribonucleotide
  modified_base 5..6: mod_base = OTHER; note = phosphorothioate internucleotide linkage
  modified_base 6..7: mod_base = OTHER; note = phosphorothioate internucleotide linkage
tatatagttatcgaggctcattctca

SEQ ID NO: 1216 - RNA, 26 nt, synthetic construct
  source 1..26: mol_type = other RNA
  modified_base 1: mod_base = OTHER; note = 2'-OMe modified nucleotide
  modified_base 3: mod_base = OTHER; note = 2'-OMe modified nucleotide
  modified_base 5: mod_base = OTHER; note = 2'-OMe modified nucleotide
  modified_base 7: mod_base = OTHER; note = 2'-OMe modified nucleotide
  modified_base 9..11: mod_base = OTHER; note = 2'-OMe modified nucleotide
  modified_base 13..15: mod_base = OTHER; note = 2'-OMe modified nucleotide
  modified_base 17: mod_base = OTHER; note = 2'-OMe modified nucleotide
  modified_base 19: mod_base = OTHER; note = 2'-OMe modified nucleotide
  modified_base 21: mod_base = OTHER; note = 2'-OMe modified nucleotide
  modified_base 23: mod_base = OTHER; note = 2'-OMe modified nucleotide
  modified_base 25: mod_base = OTHER; note = 2'-OMe modified nucleotide
  modified_base 6: mod_base = OTHER; note = 2-deoxy-2-fluoro ribonucleotide
  modified_base 8: mod_base = OTHER; note = 2-deoxy-2-fluoro ribonucleotide
  modified_base 12: mod_base = OTHER; note = 2-deoxy-2-fluoro ribonucleotide
  modified_base 16: mod_base = OTHER; note = 2-deoxy-2-fluoro ribonucleotide
  modified_base 18: mod_base = OTHER; note = 2-deoxy-2-fluoro ribonucleotide
  modified_base 20: mod_base = OTHER; note = 2-deoxy-2-fluoro ribonucleotide
  modified_base 22: mod_base = OTHER; note = 2-deoxy-2-fluoro ribonucleotide
  modified_base 24: mod_base = OTHER; note = 2-deoxy-2-fluoro ribonucleotide
  modified_base 26: mod_base = OTHER; note = 2-deoxy-2-fluoro ribonucleotide
  modified_base 5..6: mod_base = OTHER; note = phosphorothioate internucleotide linkage
  modified_base 6..7: mod_base = OTHER; note = phosphorothioate internucleotide linkage
tatatagttatcgaggctcattctca

SEQ ID NO: 1217 - RNA, 26 nt, synthetic construct
  source 1..26: mol_type = other RNA
  modified_base 1: mod_base = OTHER; note = 2'-OMe modified nucleotide
  modified_base 3: mod_base = OTHER; note = 2'-OMe modified nucleotide
  modified_base 5: mod_base = OTHER; note = 2'-OMe modified nucleotide
  modified_base 7..9: mod_base = OTHER; note = 2'-OMe modified nucleotide
  modified_base 11: mod_base = OTHER; note = 2'-OMe modified nucleotide
  modified_base 13..15: mod_base = OTHER; note = 2'-OMe modified nucleotide
  modified_base 17: mod_base = OTHER; note = 2'-OMe modified nucleotide
  modified_base 19: mod_base = OTHER; note = 2'-OMe modified nucleotide
  modified_base 21: mod_base = OTHER; note = 2'-OMe modified nucleotide
  modified_base 23: mod_base = OTHER; note = 2'-OMe modified nucleotide
  modified_base 25: mod_base = OTHER; note = 2'-OMe modified nucleotide
  modified_base 6: mod_base = OTHER; note = 2-deoxy-2-fluoro ribonucleotide
  modified_base 10: mod_base = OTHER; note = 2-deoxy-2-fluoro ribonucleotide
  modified_base 12: mod_base = OTHER; note = 2-deoxy-2-fluoro ribonucleotide
  modified_base 16: mod_base = OTHER; note = 2-deoxy-2-fluoro ribonucleotide
  modified_base 18: mod_base = OTHER; note = 2-deoxy-2-fluoro ribonucleotide
  modified_base 20: mod_base = OTHER; note = 2-deoxy-2-fluoro ribonucleotide
  modified_base 22: mod_base = OTHER; note = 2-deoxy-2-fluoro ribonucleotide
  modified_base 24: mod_base = OTHER; note = 2-deoxy-2-fluoro ribonucleotide
  modified_base 26: mod_base = OTHER; note = 2-deoxy-2-fluoro ribonucleotide
  modified_base 5..6: mod_base = OTHER; note = phosphorothioate internucleotide linkage
  modified_base 6..7: mod_base = OTHER; note = phosphorothioate internucleotide linkage
tatatagttatcgaggctcattctca

SEQ ID NO: 1218 - RNA, 26 nt, synthetic construct
  source 1..26: mol_type = other RNA
  modified_base 1: mod_base = OTHER; note = 2'-OMe modified nucleotide
  modified_base 3: mod_base = OTHER; note = 2'-OMe modified nucleotide
  modified_base 5: mod_base = OTHER; note = 2'-OMe modified nucleotide
  modified_base 7..11: mod_base = OTHER; note = 2'-OMe modified nucleotide
  modified_base 13: mod_base = OTHER; note = 2'-OMe modified nucleotide
  modified_base 15: mod_base = OTHER; note = 2'-OMe modified nucleotide
  modified_base 17: mod_base = OTHER; note = 2'-OMe modified nucleotide
  modified_base 19: mod_base = OTHER; note = 2'-OMe modified nucleotide
  modified_base 21: mod_base = OTHER; note = 2'-OMe modified nucleotide
  modified_base 23: mod_base = OTHER; note = 2'-OMe modified nucleotide
  modified_base 25: mod_base = OTHER; note = 2'-OMe modified nucleotide
  modified_base 6: mod_base = OTHER; note = 2-deoxy-2-fluoro ribonucleotide
  modified_base 12: mod_base = OTHER; note = 2-deoxy-2-fluoro ribonucleotide
  modified_base 14: mod_base = OTHER; note = 2-deoxy-2-fluoro ribonucleotide
  modified_base 16: mod_base = OTHER; note = 2-deoxy-2-fluoro ribonucleotide
  modified_base 18: mod_base = OTHER; note = 2-deoxy-2-fluoro ribonucleotide
  modified_base 20: mod_base = OTHER; note = 2-deoxy-2-fluoro ribonucleotide
  modified_base 22: mod_base = OTHER; note = 2-deoxy-2-fluoro ribonucleotide
  modified_base 24: mod_base = OTHER; note = 2-deoxy-2-fluoro ribonucleotide
  modified_base 26: mod_base = OTHER; note = 2-deoxy-2-fluoro ribonucleotide
  modified_base 5..6: mod_base = OTHER; note = phosphorothioate internucleotide linkage
  modified_base 6..7: mod_base = OTHER; note = phosphorothioate internucleotide linkage
tatatagttatcgaggctcattctca

SEQ ID NO: 1219 - RNA, 26 nt, synthetic construct
  source 1..26: mol_type = other RNA
  modified_base 1: mod_base = OTHER; note = 2'-OMe modified nucleotide
  modified_base 3: mod_base = OTHER; note = 2'-OMe modified nucleotide
  modified_base 5: mod_base = OTHER; note = 2'-OMe modified nucleotide
  modified_base 7..11: mod_base = OTHER; note = 2'-OMe modified nucleotide
  modified_base 13..14: mod_base = OTHER; note = 2'-OMe modified nucleotide
  modified_base 17: mod_base = OTHER; note = 2'-OMe modified nucleotide
  modified_base 19: mod_base = OTHER; note = 2'-OMe modified nucleotide
  modified_base 21: mod_base = OTHER; note = 2'-OMe modified nucleotide
  modified_base 23: mod_base = OTHER; note = 2'-OMe modified nucleotide
  modified_base 25: mod_base = OTHER; note = 2'-OMe modified nucleotide
  modified_base 6: mod_base = OTHER; note = 2-deoxy-2-fluoro ribonucleotide
  modified_base 12: mod_base = OTHER; note = 2-deoxy-2-fluoro ribonucleotide
  modified_base 15..16: mod_base = OTHER; note = 2-deoxy-2-fluoro ribonucleotide
  modified_base 18: mod_base = OTHER; note = 2-deoxy-2-fluoro ribonucleotide
  modified_base 20: mod_base = OTHER; note = 2-deoxy-2-fluoro ribonucleotide
  modified_base 22: mod_base = OTHER; note = 2-deoxy-2-fluoro ribonucleotide
  modified_base 24: mod_base = OTHER; note = 2-deoxy-2-fluoro ribonucleotide
  modified_base 26: mod_base = OTHER; note = 2-deoxy-2-fluoro ribonucleotide
  modified_base 5..6: mod_base = OTHER; note = phosphorothioate internucleotide linkage
  modified_base 6..7: mod_base = OTHER; note = phosphorothioate internucleotide linkage
tatatagttatcgaggctcattctca

SEQ ID NO: 1220 - RNA, 26 nt, synthetic construct
  source 1..26: mol_type = other RNA
  modified_base 1: mod_base = OTHER; note = 2'-OMe modified nucleotide
  modified_base 3: mod_base = OTHER; note = 2'-OMe modified nucleotide
  modified_base 5..7: mod_base = OTHER; note = 2'-OMe modified nucleotide
  modified_base 9: mod_base = OTHER; note = 2'-OMe modified nucleotide
  modified_base 11..13: mod_base = OTHER; note = 2'-OMe modified nucleotide
  modified_base 17..19: mod_base = OTHER; note = 2'-OMe modified nucleotide
  modified_base 21: mod_base = OTHER; note = 2'-OMe modified nucleotide
  modified_base 23: mod_base = OTHER; note = 2'-OMe modified nucleotide
  modified_base 25: mod_base = OTHER; note = 2'-OMe modified nucleotide
  modified_base 8: mod_base = OTHER; note = 2-deoxy-2-fluoro ribonucleotide
  modified_base 10: mod_base = OTHER; note = 2-deoxy-2-fluoro ribonucleotide
  modified_base 14..16: mod_base = OTHER; note = 2-deoxy-2-fluoro ribonucleotide
  modified_base 20: mod_base = OTHER; note = 2-deoxy-2-fluoro ribonucleotide
  modified_base 22: mod_base = OTHER; note = 2-deoxy-2-fluoro ribonucleotide
  modified_base 24: mod_base = OTHER; note = 2-deoxy-2-fluoro ribonucleotide
  modified_base 26: mod_base = OTHER; note = 2-deoxy-2-fluoro ribonucleotide
  modified_base 5..6: mod_base = OTHER; note = phosphorothioate internucleotide linkage
  modified_base 6..7: mod_base = OTHER; note = phosphorothioate internucleotide linkage
tatatcagaaacagaatcaggtgtca

SEQ ID NO: 1221 - RNA, 26 nt, synthetic construct
  source 1..26: mol_type = other RNA
  modified_base 1: mod_base = OTHER; note = 2'-OMe modified nucleotide
  modified_base 3: mod_base = OTHER; note = 2'-OMe modified nucleotide
  modified_base 5: mod_base = OTHER; note = 2'-OMe modified nucleotide
  modified_base 7: mod_base = OTHER; note = 2'-OMe modified nucleotide
  modified_base 9: mod_base = OTHER; note = 2'-OMe modified nucleotide
  modified_base 11: mod_base = OTHER; note = 2'-OMe modified nucleotide
  modified_base 13: mod_base = OTHER; note = 2'-OMe modified nucleotide
  modified_base 17: mod_base = OTHER; note = 2'-OMe modified nucleotide
  modified_base 19: mod_base = OTHER; note = 2'-OMe modified nucleotide
  modified_base 21: mod_base = OTHER; note = 2'-OMe modified nucleotide
  modified_base 23: mod_base = OTHER; note = 2'-OMe modified nucleotide
  modified_base 25: mod_base = OTHER; note = 2'-OMe modified nucleotide
  modified_base 6: mod_base = OTHER; note = 2-deoxy-2-fluoro ribonucleotide
  modified_base 8: mod_base = OTHER; note = 2-deoxy-2-fluoro ribonucleotide
  modified_base 10: mod_base = OTHER; note = 2-deoxy-2-fluoro ribonucleotide
  modified_base 12: mod_base = OTHER; note = 2-deoxy-2-fluoro ribonucleotide
  modified_base 14..16: mod_base = OTHER; note = 2-deoxy-2-fluoro ribonucleotide
  modified_base 18: mod_base = OTHER; note = 2-deoxy-2-fluoro ribonucleotide
  modified_base 20: mod_base = OTHER; note = 2-deoxy-2-fluoro ribonucleotide
  modified_base 22: mod_base = OTHER; note = 2-deoxy-2-fluoro ribonucleotide
  modified_base 24: mod_base = OTHER; note = 2-deoxy-2-fluoro ribonucleotide
  modified_base 26: mod_base = OTHER; note = 2-deoxy-2-fluoro ribonucleotide
  modified_base 5..6: mod_base = OTHER; note = phosphorothioate internucleotide linkage
  modified_base 6..7: mod_base = OTHER; note = phosphorothioate internucleotide linkage
tatatcagaaacagaatcaggtgtca

SEQ ID NO: 1222 - RNA, 26 nt, synthetic construct
  source 1..26: mol_type = other RNA
  modified_base 1: mod_base = OTHER; note = 2'-OMe modified nucleotide
  modified_base 3: mod_base = OTHER; note = 2'-OMe modified nucleotide
  modified_base 5: mod_base = OTHER; note = 2'-OMe modified nucleotide
  modified_base 7: mod_base = OTHER; note = 2'-OMe modified nucleotide
  modified_base 9: mod_base = OTHER; note = 2'-OMe modified nucleotide
  modified_base 11: mod_base = OTHER; note = 2'-OMe modified nucleotide
  modified_base 13: mod_base = OTHER; note = 2'-OMe modified nucleotide
  modified_base 17: mod_base = OTHER; note = 2'-OMe modified nucleotide
  modified_base 19: mod_base = OTHER; note = 2'-OMe modified nucleotide
  modified_base 21..26: mod_base = OTHER; note = 2'-OMe modified nucleotide
  modified_base 6: mod_base = OTHER; note = 2-deoxy-2-fluoro ribonucleotide
  modified_base 8: mod_base = OTHER; note = 2-deoxy-2-fluoro ribonucleotide
  modified_base 10: mod_base = OTHER; note = 2-deoxy-2-fluoro ribonucleotide
  modified_base 12: mod_base = OTHER; note = 2-deoxy-2-fluoro ribonucleotide
  modified_base 14..16: mod_base = OTHER; note = 2-deoxy-2-fluoro ribonucleotide
  modified_base 18: mod_base = OTHER; note = 2-deoxy-2-fluoro ribonucleotide
  modified_base 20: mod_base = OTHER; note = 2-deoxy-2-fluoro ribonucleotide
  modified_base 5..6: mod_base = OTHER; note = phosphorothioate internucleotide linkage
  modified_base 6..7: mod_base = OTHER; note = phosphorothioate internucleotide linkage
tatatcagaaacagaatcaggtgtca

SEQ ID NO: 1223 - RNA, 26 nt, synthetic construct
  source 1..26: mol_type = other RNA
  modified_base 1: mod_base = OTHER; note = 2'-OMe modified nucleotide
  modified_base 3: mod_base = OTHER; note = 2'-OMe modified nucleotide
  modified_base 5: mod_base = OTHER; note = 2'-OMe modified nucleotide
  modified_base 7: mod_base = OTHER; note = 2'-OMe modified nucleotide
  modified_base 9: mod_base = OTHER; note = 2'-OMe modified nucleotide
  modified_base 11: mod_base = OTHER; note = 2'-OMe modified nucleotide
  modified_base 13: mod_base = OTHER; note = 2'-OMe modified nucleotide
  modified_base 17: mod_base = OTHER; note = 2'-OMe modified nucleotide
  modified_base 19..23: mod_base = OTHER; note = 2'-OMe modified nucleotide
  modified_base 25..26: mod_base = OTHER; note = 2'-OMe modified nucleotide
  modified_base 6: mod_base = OTHER; note = 2-deoxy-2-fluoro ribonucleotide
  modified_base 8: mod_base = OTHER; note = 2-deoxy-2-fluoro ribonucleotide
  modified_base 10: mod_base = OTHER; note = 2-deoxy-2-fluoro ribonucleotide
  modified_base 12: mod_base = OTHER; note = 2-deoxy-2-fluoro ribonucleotide
  modified_base 14..16: mod_base = OTHER; note = 2-deoxy-2-fluoro ribonucleotide
  modified_base 18: mod_base = OTHER; note = 2-deoxy-2-fluoro ribonucleotide
  modified_base 24: mod_base = OTHER; note = 2-deoxy-2-fluoro ribonucleotide
  modified_base 5..6: mod_base = OTHER; note = phosphorothioate internucleotide linkage
  modified_base 6..7: mod_base = OTHER; note = phosphorothioate internucleotide linkage
tatatcagaaacagaatcaggtgtca

SEQ ID NO: 1224 - RNA, 26 nt, synthetic construct
  source 1..26: mol_type = other RNA
  modified_base 1: mod_base = OTHER; note = 2'-OMe modified nucleotide
  modified_base 3: mod_base = OTHER; note = 2'-OMe modified nucleotide
  modified_base 5: mod_base = OTHER; note = 2'-OMe modified nucleotide
  modified_base 7: mod_base = OTHER; note = 2'-OMe modified nucleotide
  modified_base 9: mod_base = OTHER; note = 2'-OMe modified nucleotide
  modified_base 11: mod_base = OTHER; note = 2'-OMe modified nucleotide
  modified_base 13: mod_base = OTHER; note = 2'-OMe modified nucleotide
  modified_base 17: mod_base = OTHER; note = 2'-OMe modified nucleotide
  modified_base 19..25: mod_base = OTHER; note = 2'-OMe modified nucleotide
  modified_base 6: mod_base = OTHER; note = 2-deoxy-2-fluoro ribonucleotide
  modified_base 8: mod_base = OTHER; note = 2-deoxy-2-fluoro ribonucleotide
  modified_base 10: mod_base = OTHER; note = 2-deoxy-2-fluoro ribonucleotide
  modified_base 12: mod_base = OTHER; note = 2-deoxy-2-fluoro ribonucleotide
  modified_base 14..16: mod_base = OTHER; note = 2-deoxy-2-fluoro ribonucleotide
  modified_base 18: mod_base = OTHER; note = 2-deoxy-2-fluoro ribonucleotide
  modified_base 26: mod_base = OTHER; note = 2-deoxy-2-fluoro ribonucleotide
  modified_base 5..6: mod_base = OTHER; note = phosphorothioate internucleotide linkage
  modified_base 6..7: mod_base = OTHER; note = phosphorothioate internucleotide linkage
tatatcagaaacagaatcaggtgtca

SEQ ID NO: 1225 - RNA, 26 nt, synthetic construct
  source 1..26: mol_type = other RNA
  modified_base 1: mod_base = OTHER; note = 2'-OMe modified nucleotide
  modified_base 3: mod_base = OTHER; note = 2'-OMe modified nucleotide
  modified_base 5: mod_base = OTHER; note = 2'-OMe modified nucleotide
  modified_base 7: mod_base = OTHER; note = 2'-OMe modified nucleotide
  modified_base 9: mod_base = OTHER; note = 2'-OMe modified nucleotide
  modified_base 11: mod_base = OTHER; note = 2'-OMe modified nucleotide
  modified_base 13: mod_base = OTHER; note = 2'-OMe modified nucleotide
  modified_base 17: mod_base = OTHER; note = 2'-OMe modified nucleotide
  modified_base 19..21: mod_base = OTHER; note = 2'-OMe modified nucleotide
  modified_base 23..26: mod_base = OTHER; note = 2'-OMe modified nucleotide
  modified_base 6: mod_base = OTHER; note = 2-deoxy-2-fluoro ribonucleotide
  modified_base 8: mod_base = OTHER; note = 2-deoxy-2-fluoro ribonucleotide
  modified_base 10: mod_base = OTHER; note = 2-deoxy-2-fluoro ribonucleotide
  modified_base 12: mod_base = OTHER; note = 2-deoxy-2-fluoro ribonucleotide
  modified_base 14..16: mod_base = OTHER; note = 2-deoxy-2-fluoro ribonucleotide
  modified_base 18: mod_base = OTHER; note = 2-deoxy-2-fluoro ribonucleotide
  modified_base 22: mod_base = OTHER; note = 2-deoxy-2-fluoro ribonucleotide
  modified_base 5..6: mod_base = OTHER; note = phosphorothioate internucleotide linkage
  modified_base 6..7: mod_base = OTHER; note = phosphorothioate internucleotide linkage
tatatcagaaacagaatcaggtgtca

SEQ ID NO: 1226 - RNA, 26 nt, synthetic construct
  source 1..26: mol_type = other RNA
  modified_base 1: mod_base = OTHER; note = 2'-OMe modified nucleotide
  modified_base 3: mod_base = OTHER; note = 2'-OMe modified nucleotide
  modified_base 5: mod_base = OTHER; note = 2'-OMe modified nucleotide
  modified_base 7: mod_base = OTHER; note = 2'-OMe modified nucleotide
  modified_base 9: mod_base = OTHER; note = 2'-OMe modified nucleotide
  modified_base 11: mod_base = OTHER; note = 2'-OMe modified nucleotide
  modified_base 13: mod_base = OTHER; note = 2'-OMe modified nucleotide
  modified_base 15: mod_base = OTHER; note = 2'-OMe modified nucleotide
  modified_base 17: mod_base = OTHER; note = 2'-OMe modified nucleotide
  modified_base 19: mod_base = OTHER; note = 2'-OMe modified nucleotide
  modified_base 21..25: mod_base = OTHER; note = 2'-OMe modified nucleotide
  modified_base 6: mod_base = OTHER; note = 2-deoxy-2-fluoro ribonucleotide
  modified_base 8: mod_base = OTHER; note = 2-deoxy-2-fluoro ribonucleotide
  modified_base 10: mod_base = OTHER; note = 2-deoxy-2-fluoro ribonucleotide
  modified_base 12: mod_base = OTHER; note = 2-deoxy-2-fluoro ribonucleotide
  modified_base 14: mod_base = OTHER; note = 2-deoxy-2-fluoro ribonucleotide
  modified_base 16: mod_base = OTHER; note = 2-deoxy-2-fluoro ribonucleotide
  modified_base 18: mod_base = OTHER; note = 2-deoxy-2-fluoro ribonucleotide
  modified_base 20: mod_base = OTHER; note = 2-deoxy-2-fluoro ribonucleotide
  modified_base 26: mod_base = OTHER; note = 2-deoxy-2-fluoro ribonucleotide
  modified_base 5..6: mod_base = OTHER; note = phosphorothioate internucleotide linkage
  modified_base 6..7: mod_base = OTHER; note = phosphorothioate internucleotide linkage
tatatcagaaacagaatcaggtgtca

SEQ ID NO: 1227 - RNA, 26 nt, synthetic construct
  source 1..26: mol_type = other RNA
  modified_base 1: mod_base = OTHER; note = 2'-OMe modified nucleotide
  modified_base 3: mod_base = OTHER; note = 2'-OMe modified nucleotide
  modified_base 5: mod_base = OTHER; note = 2'-OMe modified nucleotide
  modified_base 7: mod_base = OTHER; note = 2'-OMe modified nucleotide
  modified_base 9: mod_base = OTHER; note = 2'-OMe modified nucleotide
  modified_base 11: mod_base = OTHER; note = 2'-OMe modified nucleotide
  modified_base 13: mod_base = OTHER; note = 2'-OMe modified nucleotide
  modified_base 15: mod_base = OTHER; note = 2'-OMe modified nucleotide
  modified_base 17: mod_base = OTHER; note = 2'-OMe modified nucleotide
  modified_base 19..23: mod_base = OTHER; note = 2'-OMe modified nucleotide
  modified_base 25: mod_base = OTHER; note = 2'-OMe modified nucleotide
  modified_base 6: mod_base = OTHER; note = 2-deoxy-2-fluoro ribonucleotide
  modified_base 8: mod_base = OTHER; note = 2-deoxy-2-fluoro ribonucleotide
  modified_base 10: mod_base = OTHER; note = 2-deoxy-2-fluoro ribonucleotide
  modified_base 12: mod_base = OTHER; note = 2-deoxy-2-fluoro ribonucleotide
  modified_base 14: mod_base = OTHER; note = 2-deoxy-2-fluoro ribonucleotide
  modified_base 16: mod_base = OTHER; note = 2-deoxy-2-fluoro ribonucleotide
  modified_base 18: mod_base = OTHER; note = 2-deoxy-2-fluoro ribonucleotide
  modified_base 24: mod_base = OTHER; note = 2-deoxy-2-fluoro ribonucleotide
  modified_base 26: mod_base = OTHER; note = 2-deoxy-2-fluoro ribonucleotide
  modified_base 5..6: mod_base = OTHER; note = phosphorothioate internucleotide linkage
  modified_base 6..7: mod_base = OTHER; note = phosphorothioate internucleotide linkage
tatatcagaaacagaatcaggtgtca

SEQ ID NO: 1228 - RNA, 26 nt, synthetic construct
  source 1..26: mol_type = other RNA
  modified_base 1: mod_base = OTHER; note = 2'-OMe modified nucleotide
  modified_base 3: mod_base = OTHER; note = 2'-OMe modified nucleotide
  modified_base 5: mod_base = OTHER; note = 2'-OMe modified nucleotide
  modified_base 7: mod_base = OTHER; note = 2'-OMe modified nucleotide
  modified_base 9: mod_base = OTHER; note = 2'-OMe modified nucleotide
  modified_base 11: mod_base = OTHER; note = 2'-OMe modified nucleotide
  modified_base 13: mod_base = OTHER; note = 2'-OMe modified nucleotide
  modified_base 15: mod_base = OTHER; note = 2'-OMe modified nucleotide
  modified_base 17: mod_base = OTHER; note = 2'-OMe modified nucleotide
  modified_base 19..21: mod_base = OTHER; note = 2'-OMe modified nucleotide
  modified_base 23..25: mod_base = OTHER; note = 2'-OMe modified nucleotide
  modified_base 6: mod_base = OTHER; note = 2-deoxy-2-fluoro ribonucleotide
  modified_base 8: mod_base = OTHER; note = 2-deoxy-2-fluoro ribonucleotide
  modified_base 10: mod_base = OTHER; note = 2-deoxy-2-fluoro ribonucleotide
  modified_base 12: mod_base = OTHER; note = 2-deoxy-2-fluoro ribonucleotide
  modified_base 14: mod_base = OTHER; note = 2-deoxy-2-fluoro ribonucleotide
  modified_base 16: mod_base = OTHER; note = 2-deoxy-2-fluoro ribonucleotide
  modified_base 18: mod_base = OTHER; note = 2-deoxy-2-fluoro ribonucleotide
  modified_base 22: mod_base = OTHER; note = 2-deoxy-2-fluoro ribonucleotide
  modified_base 26: mod_base = OTHER; note = 2-deoxy-2-fluoro ribonucleotide
  modified_base 5..6: mod_base = OTHER; note = phosphorothioate internucleotide linkage
  modified_base 6..7: mod_base = OTHER; note = phosphorothioate internucleotide linkage
tatatcagaaacagaatcaggtgtca

SEQ ID NO: 1229 - RNA, 26 nt, synthetic construct
  source 1..26: mol_type = other RNA
  modified_base 1: mod_base = OTHER; note = 2'-OMe modified nucleotide
  modified_base 3: mod_base = OTHER; note = 2'-OMe modified nucleotide
  modified_base 5: mod_base = OTHER; note = 2'-OMe modified nucleotide
  modified_base 7: mod_base = OTHER; note = 2'-OMe modified nucleotide
  modified_base 9: mod_base = OTHER; note = 2'-OMe modified nucleotide
  modified_base 11: mod_base = OTHER; note = 2'-OMe modified nucleotide
  modified_base 13..14: mod_base = OTHER; note = 2'-OMe modified nucleotide
  modified_base 17: mod_base = OTHER; note = 2'-OMe modified nucleotide
  modified_base 19..23: mod_base = OTHER; note = 2'-OMe modified nucleotide
  modified_base 25: mod_base = OTHER; note = 2'-OMe modified nucleotide
  modified_base 6: mod_base = OTHER; note = 2-deoxy-2-fluoro ribonucleotide
  modified_base 8: mod_base = OTHER; note = 2-deoxy-2-fluoro ribonucleotide
  modified_base 10: mod_base = OTHER; note = 2-deoxy-2-fluoro ribonucleotide
  modified_base 12: mod_base = OTHER; note = 2-deoxy-2-fluoro ribonucleotide
  modified_base 15..16: mod_base = OTHER; note = 2-deoxy-2-fluoro ribonucleotide
  modified_base 18: mod_base = OTHER; note = 2-deoxy-2-fluoro ribonucleotide
  modified_base 24: mod_base = OTHER; note = 2-deoxy-2-fluoro ribonucleotide
  modified_base 26: mod_base = OTHER; note = 2-deoxy-2-fluoro ribonucleotide
  modified_base 5..6: mod_base = OTHER; note = phosphorothioate internucleotide linkage
  modified_base 6..7: mod_base = OTHER; note = phosphorothioate internucleotide linkage
tatatcagaaacagaatcaggtgtca

SEQ ID NO: 1230 - RNA, 26 nt, synthetic construct
  source 1..26: mol_type = other RNA
  modified_base 1: mod_base = OTHER; note = 2'-OMe modified nucleotide
  modified_base 3: mod_base = OTHER; note = 2'-OMe modified nucleotide
  modified_base 5: mod_base = OTHER; note = 2'-OMe modified nucleotide
  modified_base 7: mod_base = OTHER; note = 2'-OMe modified nucleotide
  modified_base 9: mod_base = OTHER; note = 2'-OMe modified nucleotide
  modified_base 11: mod_base = OTHER; note = 2'-OMe modified nucleotide
  modified_base 13..15: mod_base = OTHER; note = 2'-OMe modified nucleotide
  modified_base 17: mod_base = OTHER; note = 2'-OMe modified nucleotide
  modified_base 19..21: mod_base = OTHER; note = 2'-OMe modified nucleotide
  modified_base 23: mod_base = OTHER; note = 2'-OMe modified nucleotide
  modified_base 25: mod_base = OTHER; note = 2'-OMe modified nucleotide
  modified_base 6: mod_base = OTHER; note = 2-deoxy-2-fluoro ribonucleotide
  modified_base 8: mod_base = OTHER; note = 2-deoxy-2-fluoro ribonucleotide
  modified_base 10: mod_base = OTHER; note = 2-deoxy-2-fluoro ribonucleotide
  modified_base 12: mod_base = OTHER; note = 2-deoxy-2-fluoro ribonucleotide
  modified_base 16: mod_base = OTHER; note = 2-deoxy-2-fluoro ribonucleotide
  modified_base 18: mod_base = OTHER; note = 2-deoxy-2-fluoro ribonucleotide
  modified_base 22: mod_base = OTHER; note = 2-deoxy-2-fluoro ribonucleotide
  modified_base 24: mod_base = OTHER; note = 2-deoxy-2-fluoro ribonucleotide
  modified_base 26: mod_base = OTHER; note = 2-deoxy-2-fluoro ribonucleotide
  modified_base 5..6: mod_base = OTHER; note = phosphorothioate internucleotide linkage
  modified_base 6..7: mod_base = OTHER; note = phosphorothioate internucleotide linkage
tatatcagaaacagaatcaggtgtca

SEQ ID NO: 1231 - RNA, 26 nt, synthetic construct
  source 1..26: mol_type = other RNA
  modified_base 1: mod_base = OTHER; note = 2'-OMe modified nucleotide
  modified_base 3: mod_base = OTHER; note = 2'-OMe modified nucleotide
  modified_base 5: mod_base = OTHER; note = 2'-OMe modified nucleotide
  modified_base 7: mod_base = OTHER; note = 2'-OMe modified nucleotide
  modified_base 9: mod_base = OTHER; note = 2'-OMe modified nucleotide
  modified_base 11: mod_base = OTHER; note = 2'-OMe modified nucleotide
  modified_base 13..15: mod_base = OTHER; note = 2'-OMe modified nucleotide
  modified_base 17: mod_base = OTHER; note = 2'-OMe modified nucleotide
  modified_base 19: mod_base = OTHER; note = 2'-OMe modified nucleotide
  modified_base 21..23: mod_base = OTHER; note = 2'-OMe modified nucleotide
  modified_base 25: mod_base = OTHER; note = 2'-OMe modified nucleotide
  modified_base 6: mod_base = OTHER; note = 2-deoxy-2-fluoro ribonucleotide
  modified_base 8: mod_base = OTHER; note = 2-deoxy-2-fluoro ribonucleotide
  modified_base 10: mod_base = OTHER; note = 2-deoxy-2-fluoro ribonucleotide
  modified_base 12: mod_base = OTHER; note = 2-deoxy-2-fluoro ribonucleotide
  modified_base 16: mod_base = OTHER; note = 2-deoxy-2-fluoro ribonucleotide
  modified_base 18: mod_base = OTHER; note = 2-deoxy-2-fluoro ribonucleotide
  modified_base 20: mod_base = OTHER; note = 2-deoxy-2-fluoro ribonucleotide
  modified_base 24: mod_base = OTHER; note = 2-deoxy-2-fluoro ribonucleotide
  modified_base 26: mod_base = OTHER; note = 2-deoxy-2-fluoro ribonucleotide
  modified_base 5..6: mod_base = OTHER; note = phosphorothioate internucleotide linkage
  modified_base 6..7: mod_base = OTHER; note = phosphorothioate internucleotide linkage
tatatcagaaacagaatcaggtgtca

SEQ ID NO: 1232 - RNA, 26 nt, synthetic construct
  source 1..26: mol_type = other RNA
  modified_base 1: mod_base = OTHER; note = 2'-OMe modified nucleotide
  modified_base 3: mod_base = OTHER; note = 2'-OMe modified nucleotide
  modified_base 5: mod_base = OTHER; note = 2'-OMe modified nucleotide
  modified_base 7: mod_base = OTHER; note = 2'-OMe modified nucleotide
  modified_base 9..11: mod_base = OTHER; note = 2'-OMe modified nucleotide
  modified_base 13..14: mod_base = OTHER; note = 2'-OMe modified nucleotide
  modified_base 17: mod_base = OTHER; note = 2'-OMe modified nucleotide
  modified_base 19: mod_base = OTHER; note = 2'-OMe modified nucleotide
  modified_base 21: mod_base = OTHER; note = 2'-OMe modified nucleotide
  modified_base 23: mod_base = OTHER; note = 2'-OMe modified nucleotide
  modified_base 25: mod_base = OTHER; note = 2'-OMe modified nucleotide
  modified_base 6: mod_base = OTHER; note = 2-deoxy-2-fluoro ribonucleotide
  modified_base 8: mod_base = OTHER; note = 2-deoxy-2-fluoro ribonucleotide
  modified_base 12: mod_base = OTHER; note = 2-deoxy-2-fluoro ribonucleotide
  modified_base 15..16: mod_base = OTHER; note = 2-deoxy-2-fluoro ribonucleotide
  modified_base 18: mod_base = OTHER; note = 2-deoxy-2-fluoro ribonucleotide
  modified_base 20: mod_base = OTHER; note = 2-deoxy-2-fluoro ribonucleotide
  modified_base 22: mod_base = OTHER; note = 2-deoxy-2-fluoro ribonucleotide
  modified_base 24: mod_base = OTHER; note = 2-deoxy-2-fluoro ribonucleotide
  modified_base 26: mod_base = OTHER; note = 2-deoxy-2-fluoro ribonucleotide
  modified_base 5..6: mod_base = OTHER; note = phosphorothioate internucleotide linkage
  modified_base 6..7: mod_base = OTHER; note = phosphorothioate internucleotide linkage
tatatcagaaacagaatcaggtgtca

SEQ ID NO: 1233 - RNA, 26 nt, synthetic construct
  source 1..26: mol_type = other RNA
  modified_base 1: mod_base = OTHER; note = 2'-OMe modified nucleotide
  modified_base 3: mod_base = OTHER; note = 2'-OMe modified nucleotide
  modified_base 5: mod_base = OTHER; note = 2'-OMe modified nucleotide
  modified_base 7: mod_base = OTHER; note = 2'-OMe modified nucleotide
  modified_base 9..11: mod_base = OTHER; note = 2'-OMe modified nucleotide
  modified_base 13: mod_base = OTHER; note = 2'-OMe modified nucleotide
  modified_base 15: mod_base = OTHER; note = 2'-OMe modified nucleotide
  modified_base 17: mod_base = OTHER; note = 2'-OMe modified nucleotide
  modified_base 19: mod_base = OTHER; note = 2'-OMe modified nucleotide
  modified_base 21: mod_base = OTHER; note = 2'-OMe modified nucleotide
  modified_base 23: mod_base = OTHER; note = 2'-OMe modified nucleotide
  modified_base 25: mod_base = OTHER; note = 2'-OMe modified nucleotide
  modified_base 6: mod_base = OTHER; note = 2-deoxy-2-fluoro ribonucleotide
  modified_base 8: mod_base = OTHER; note = 2-deoxy-2-fluoro ribonucleotide
  modified_base 12: mod_base = OTHER; note = 2-deoxy-2-fluoro ribonucleotide
  modified_base 14: mod_base = OTHER; note = 2-deoxy-2-fluoro ribonucleotide
  modified_base 16: mod_base = OTHER; note = 2-deoxy-2-fluoro ribonucleotide
  modified_base 18: mod_base = OTHER; note = 2-deoxy-2-fluoro ribonucleotide
  modified_base 20: mod_base = OTHER; note = 2-deoxy-2-fluoro ribonucleotide
  modified_base 22: mod_base = OTHER; note = 2-deoxy-2-fluoro ribonucleotide
  modified_base 24: mod_base = OTHER; note = 2-deoxy-2-fluoro ribonucleotide
  modified_base 26: mod_base = OTHER; note = 2-deoxy-2-fluoro ribonucleotide
  modified_base 5..6: mod_base = OTHER; note = phosphorothioate internucleotide linkage
  modified_base 6..7: mod_base = OTHER; note = phosphorothioate internucleotide linkage
tatatcagaaacagaatcaggtgtca

SEQ ID NO: 1234 - RNA, 26 nt, synthetic construct
  source 1..26: mol_type = other RNA
  modified_base 1: mod_base = OTHER; note = 2'-OMe modified nucleotide
  modified_base 3: mod_base = OTHER; note = 2'-OMe modified nucleotide
  modified_base 5: mod_base = OTHER; note = 2'-OMe modified nucleotide
  modified_base 7: mod_base = OTHER; note = 2'-OMe modified nucleotide
  modified_base 9: mod_base = OTHER; note = 2'-OMe modified nucleotide
  modified_base 11: mod_base = OTHER; note = 2'-OMe modified nucleotide
  modified_base 13..15: mod_base = OTHER; note = 2'-OMe modified nucleotide
  modified_base 17: mod_base = OTHER; note = 2'-OMe modified nucleotide
  modified_base 19: mod_base = OTHER; note = 2'-OMe modified nucleotide
  modified_base 21: mod_base = OTHER; note = 2'-OMe modified nucleotide
  modified_base 23: mod_base = OTHER; note = 2'-OMe modified nucleotide
  modified_base 25: mod_base = OTHER; note = 2'-OMe modified nucleotide
  modified_base 6: mod_base = OTHER; note = 2-deoxy-2-fluoro ribonucleotide
  modified_base 8: mod_base = OTHER; note = 2-deoxy-2-fluoro ribonucleotide
  modified_base 10: mod_base = OTHER; note = 2-deoxy-2-fluoro ribonucleotide
  modified_base 12: mod_base = OTHER; note = 2-deoxy-2-fluoro ribonucleotide
  modified_base 16: mod_base = OTHER; note = 2-deoxy-2-fluoro ribonucleotide
  modified_base 18: mod_base = OTHER; note = 2-deoxy-2-fluoro ribonucleotide
  modified_base 20: mod_base = OTHER; note = 2-deoxy-2-fluoro ribonucleotide
  modified_base 22: mod_base = OTHER; note = 2-deoxy-2-fluoro ribonucleotide
  modified_base 24: mod_base = OTHER; note = 2-deoxy-2-fluoro ribonucleotide
  modified_base 26: mod_base = OTHER; note = 2-deoxy-2-fluoro ribonucleotide
  modified_base 5..6: mod_base = OTHER; note = phosphorothioate internucleotide linkage
  modified_base 6..7: mod_base = OTHER; note = phosphorothioate internucleotide linkage
tatatcagaaacagaatcaggtgtca

SEQ ID NO: 1235 - RNA, 26 nt, synthetic construct
  source 1..26: mol_type = other RNA
  modified_base 1: mod_base = OTHER; note = 2'-OMe modified nucleotide
  modified_base 3: mod_base = OTHER; note = 2'-OMe modified nucleotide
  modified_base 5: mod_base = OTHER; note = 2'-OMe modified nucleotide
  modified_base 7: mod_base = OTHER; note = 2'-OMe modified nucleotide
  modified_base 9..11: mod_base = OTHER; note = 2'-OMe modified nucleotide
  modified_base 13..15: mod_base = OTHER; note = 2'-OMe modified nucleotide
  modified_base 17: mod_base = OTHER; note = 2'-OMe modified nucleotide
  modified_base 19: mod_base = OTHER; note = 2'-OMe modified nucleotide
  modified_base 21: mod_base = OTHER; note = 2'-OMe modified nucleotide
  modified_base 23: mod_base = OTHER; note = 2'-OMe modified nucleotide
  modified_base 25: mod_base = OTHER; note = 2'-OMe modified nucleotide
  modified_base 6: mod_base = OTHER; note = 2-deoxy-2-fluoro ribonucleotide
  modified_base 8: mod_base = OTHER; note = 2-deoxy-2-fluoro ribonucleotide
  modified_base 12: mod_base = OTHER; note = 2-deoxy-2-fluoro ribonucleotide
  modified_base 16: mod_base = OTHER; note = 2-deoxy-2-fluoro ribonucleotide
  modified_base 18: mod_base = OTHER; note = 2-deoxy-2-fluoro ribonucleotide
  modified_base 20: mod_base = OTHER; note = 2-deoxy-2-fluoro ribonucleotide
  modified_base 22: mod_base = OTHER; note = 2-deoxy-2-fluoro ribonucleotide
  modified_base 24: mod_base = OTHER; note = 2-deoxy-2-fluoro ribonucleotide
  modified_base 26: mod_base = OTHER; note = 2-deoxy-2-fluoro ribonucleotide
  modified_base 5..6: mod_base = OTHER; note = phosphorothioate internucleotide linkage
  modified_base 6..7: mod_base = OTHER; note = phosphorothioate internucleotide linkage
tatatcagaaacagaatcaggtgtca

SEQ ID NO: 1236 - RNA, 26 nt, synthetic construct
  source 1..26: mol_type = other RNA
  modified_base 1: mod_base = OTHER; note = 2'-OMe modified nucleotide
  modified_base 3: mod_base = OTHER; note = 2'-OMe modified nucleotide
  modified_base 5: mod_base = OTHER; note = 2'-OMe modified nucleotide
  modified_base 7..9: mod_base = OTHER; note = 2'-OMe modified nucleotide
  modified_base 11: mod_base = OTHER; note = 2'-OMe modified nucleotide
  modified_base 13..15: mod_base = OTHER; note = 2'-OMe modified nucleotide
  modified_base 17: mod_base = OTHER; note = 2'-OMe modified nucleotide
  modified_base 19: mod_base = OTHER; note = 2'-OMe modified nucleotide
  modified_base 21: mod_base = OTHER; note = 2'-OMe modified nucleotide
  modified_base 23: mod_base = OTHER; note = 2'-OMe modified nucleotide
  modified_base 25: mod_base = OTHER; note = 2'-OMe modified nucleotide
  modified_base 6: mod_base = OTHER; note = 2-deoxy-2-fluoro ribonucleotide
  modified_base 10: mod_base = OTHER; note = 2-deoxy-2-fluoro ribonucleotide
  modified_base 12: mod_base = OTHER; note = 2-deoxy-2-fluoro ribonucleotide
  modified_base 16: mod_base = OTHER; note = 2-deoxy-2-fluoro ribonucleotide
  modified_base 18: mod_base = OTHER; note = 2-deoxy-2-fluoro ribonucleotide
  modified_base 20: mod_base = OTHER; note = 2-deoxy-2-fluoro ribonucleotide
  modified_base 22: mod_base = OTHER; note = 2-deoxy-2-fluoro ribonucleotide
  modified_base 24: mod_base = OTHER; note = 2-deoxy-2-fluoro ribonucleotide
  modified_base 26: mod_base = OTHER; note = 2-deoxy-2-fluoro ribonucleotide
  modified_base 5..6: mod_base = OTHER; note = phosphorothioate internucleotide linkage
  modified_base 6..7: mod_base = OTHER; note = phosphorothioate internucleotide linkage
tatatcagaaacagaatcaggtgtca

SEQ ID NO: 1237 - RNA, 26 nt, synthetic construct
  source 1..26: mol_type = other RNA
  modified_base 1: mod_base = OTHER; note = 2'-OMe modified nucleotide
  modified_base 3: mod_base = OTHER; note = 2'-OMe modified nucleotide
  modified_base 5: mod_base = OTHER; note = 2'-OMe modified nucleotide
  modified_base 7..11: mod_base = OTHER; note = 2'-OMe modified nucleotide
  modified_base 13..14: mod_base = OTHER; note = 2'-OMe modified nucleotide
  modified_base 17: mod_base = OTHER; note = 2'-OMe modified nucleotide
  modified_base 19: mod_base = OTHER; note = 2'-OMe modified nucleotide
  modified_base 21: mod_base = OTHER; note = 2'-OMe modified nucleotide
  modified_base 23: mod_base = OTHER; note = 2'-OMe modified nucleotide
  modified_base 25: mod_base = OTHER; note = 2'-OMe modified nucleotide
  modified_base 6: mod_base = OTHER; note = 2-deoxy-2-fluoro ribonucleotide
  modified_base 12: mod_base = OTHER; note = 2-deoxy-2-fluoro ribonucleotide
  modified_base 15..16: mod_base = OTHER; note = 2-deoxy-2-fluoro ribonucleotide
  modified_base 18: mod_base = OTHER; note = 2-deoxy-2-fluoro ribonucleotide
  modified_base 20: mod_base = OTHER; note = 2-deoxy-2-fluoro ribonucleotide
  modified_base 22: mod_base = OTHER; note = 2-deoxy-2-fluoro ribonucleotide
  modified_base 24: mod_base = OTHER; note = 2-deoxy-2-fluoro ribonucleotide
  modified_base 26: mod_base = OTHER; note = 2-deoxy-2-fluoro ribonucleotide
  modified_base 5..6: mod_base = OTHER; note = phosphorothioate internucleotide linkage
  modified_base 6..7: mod_base = OTHER; note = phosphorothioate internucleotide linkage
tatatcagaaacagaatcaggtgtca

SEQ ID NO: 1238 - RNA, 26 nt, synthetic construct
  source 1..26: mol_type = other RNA
  modified_base 1: mod_base = OTHER; note = 2'-OMe modified nucleotide
  modified_base 3: mod_base = OTHER; note = 2'-OMe modified nucleotide
  modified_base 5: mod_base = OTHER; note = 2'-OMe modified nucleotide
  modified_base 7..11: mod_base = OTHER; note = 2'-OMe modified nucleotide
  modified_base 13: mod_base = OTHER; note = 2'-OMe modified nucleotide
  modified_base 15: mod_base = OTHER; note = 2'-OMe modified nucleotide
  modified_base 17: mod_base = OTHER; note = 2'-OMe modified nucleotide
  modified_base 19: mod_base = OTHER; note = 2'-OMe modified nucleotide
  modified_base 21: mod_base = OTHER; note = 2'-OMe modified nucleotide
  modified_base 23: mod_base = OTHER; note = 2'-OMe modified nucleotide
  modified_base 25: mod_base = OTHER; note = 2'-OMe modified nucleotide
  modified_base 6: mod_base = OTHER; note = 2-deoxy-2-fluoro ribonucleotide
  modified_base 12: mod_base = OTHER; note = 2-deoxy-2-fluoro ribonucleotide
  modified_base 14: mod_base = OTHER; note = 2-deoxy-2-fluoro ribonucleotide
  modified_base 16: mod_base = OTHER; note = 2-deoxy-2-fluoro ribonucleotide
  modified_base 18: mod_base = OTHER; note = 2-deoxy-2-fluoro ribonucleotide
  modified_base 20: mod_base = OTHER; note = 2-deoxy-2-fluoro ribonucleotide
  modified_base 22: mod_base = OTHER; note = 2-deoxy-2-fluoro ribonucleotide
  modified_base 24: mod_base = OTHER; note = 2-deoxy-2-fluoro ribonucleotide
  modified_base 26: mod_base = OTHER; note = 2-deoxy-2-fluoro ribonucleotide
  modified_base 5..6: mod_base = OTHER; note = phosphorothioate internucleotide linkage
  modified_base 6..7: mod_base = OTHER; note = phosphorothioate internucleotide linkage
tatatcagaaacagaatcaggtgtca

SEQ ID NO: 1239 - RNA, 26 nt, synthetic construct
  source 1..26: mol_type = other RNA
  modified_base 1: mod_base = OTHER; note = 2'-OMe modified nucleotide
  modified_base 3: mod_base = OTHER; note = 2'-OMe modified nucleotide
  modified_base 5: mod_base = OTHER; note = 2'-OMe modified nucleotide
  modified_base 7..11: mod_base = OTHER; note = 2'-OMe modified nucleotide
  modified_base 13: mod_base = OTHER; note = 2'-OMe modified nucleotide
  modified_base 17: mod_base = OTHER; note = 2'-OMe modified nucleotide
  modified_base 19: mod_base = OTHER; note = 2'-OMe modified nucleotide
  modified_base 21: mod_base = OTHER; note = 2'-OMe modified nucleotide
  modified_base 23: mod_base = OTHER; note = 2'-OMe modified nucleotide
  modified_base 25: mod_base = OTHER; note = 2'-OMe modified nucleotide
  modified_base 6: mod_base = OTHER; note = 2-deoxy-2-fluoro ribonucleotide
  modified_base 12: mod_base = OTHER; note = 2-deoxy-2-fluoro ribonucleotide
  modified_base 14..16: mod_base = OTHER; note = 2-deoxy-2-fluoro ribonucleotide
  modified_base 18: mod_base = OTHER; note = 2-deoxy-2-fluoro ribonucleotide
  modified_base 20: mod_base = OTHER; note = 2-deoxy-2-fluoro ribonucleotide
  modified_base 22: mod_base = OTHER; note = 2-deoxy-2-fluoro ribonucleotide
  modified_base 24: mod_base = OTHER; note = 2-deoxy-2-fluoro ribonucleotide
  modified_base 26: mod_base = OTHER; note = 2-deoxy-2-fluoro ribonucleotide
  modified_base 5..6: mod_base = OTHER; note = phosphorothioate internucleotide linkage
  modified_base 6..7: mod_base = OTHER; note = phosphorothioate internucleotide linkage
tatatcagaaacagaatcaggtgtca

SEQ ID NO: 1240 - RNA, 26 nt, synthetic construct
  source 1..26: mol_type = other RNA
  modified_base 1: mod_base = OTHER; note = 2'-OMe modified nucleotide
  modified_base 3: mod_base = OTHER; note = 2'-OMe modified nucleotide
  modified_base 5: mod_base = OTHER; note = 2'-OMe modified nucleotide
  modified_base 7..9: mod_base = OTHER; note = 2'-OMe modified nucleotide
  modified_base 11: mod_base = OTHER; note = 2'-OMe modified nucleotide
  modified_base 13..14: mod_base = OTHER; note = 2'-OMe modified nucleotide
  modified_base 17: mod_base = OTHER; note = 2'-OMe modified nucleotide
  modified_base 19: mod_base = OTHER; note = 2'-OMe modified nucleotide
  modified_base 21: mod_base = OTHER; note = 2'-OMe modified nucleotide
  modified_base 23: mod_base = OTHER; note = 2'-OMe modified nucleotide
  modified_base 25: mod_base = OTHER; note = 2'-OMe modified nucleotide
  modified_base 6: mod_base = OTHER; note = 2-deoxy-2-fluoro ribonucleotide
  modified_base 10: mod_base = OTHER; note = 2-deoxy-2-fluoro ribonucleotide
  modified_base 12: mod_base = OTHER; note = 2-deoxy-2-fluoro ribonucleotide
  modified_base 15..16: mod_base = OTHER; note = 2-deoxy-2-fluoro ribonucleotide
  modified_base 18: mod_base = OTHER; note = 2-deoxy-2-fluoro ribonucleotide
  modified_base 20: mod_base = OTHER; note = 2-deoxy-2-fluoro ribonucleotide
  modified_base 22: mod_base = OTHER; note = 2-deoxy-2-fluoro ribonucleotide
  modified_base 24: mod_base = OTHER; note = 2-deoxy-2-fluoro ribonucleotide
  modified_base 26: mod_base = OTHER; note = 2-deoxy-2-fluoro ribonucleotide
  modified_base 5..6: mod_base = OTHER; note = phosphorothioate internucleotide linkage
  modified_base 6..7: mod_base = OTHER; note = phosphorothioate internucleotide linkage
tatatcagaaacagaatcaggtgtca

SEQ ID NO: 1241 - RNA, 21 nt, synthetic construct
  source 1..21: mol_type = other RNA
  modified_base 6: mod_base = OTHER; note = Thymine
gccccttattgttatacgatt

SEQ ID NO: 1242 - RNA, 19 nt, synthetic construct
  source 1..19: mol_type = other RNA
  modified_base 1: mod_base = OTHER; note = Thymine
tcgtataacaataaggggc

SEQ ID NO: 1243 - RNA, 19 nt, synthetic construct
  source 1..19: mol_type = other RNA
gccccttattgttatacga

SEQ ID NO: 1244 - RNA, 18 nt, synthetic construct
  source 1..18: mol_type = other RNA
tcgtataacaataagggg

SEQ ID NO: 1245 - RNA, 18 nt, synthetic construct
  source 1..18: mol_type = other RNA
ccccttattgttatacga

SEQ ID NO: 1246 - RNA, 17 nt, synthetic construct
  source 1..17: mol_type = other RNA
tcgtataacaataaggg

SEQ ID NO: 1247 - RNA, 17 nt, synthetic construct
  source 1..17: mol_type = other RNA
cccttattgttatacga

SEQ ID NO: 1248 - RNA, 19 nt, synthetic construct
  source 1..19: mol_type = other RNA
  modified_base 1: mod_base = OTHER; note = Thymine
tgagaatgagcctcgataa

SEQ ID NO: 1249 - RNA, 19 nt, synthetic construct
  source 1..19: mol_type = other RNA
ttatcgaggctcattctca

SEQ ID NO: 1250 - RNA, 18 nt, synthetic construct
  source 1..18: mol_type = other RNA
tgagaatgagcctcgata

SEQ ID NO: 1251 - RNA, 18 nt, synthetic construct
  source 1..18: mol_type = other RNA
tatcgaggctcattctca

SEQ ID NO: 1252 - RNA, 17 nt, synthetic construct
  source 1..17: mol_type = other RNA
tgagaatgagcctcgat

SEQ ID NO: 1253 - RNA, 17 nt, synthetic construct
  source 1..17: mol_type = other RNA
atcgaggctcattctca

SEQ ID NO: 1254 - RNA, 17 nt, synthetic construct
  source 1..17: mol_type = other RNA
tgtataacaataagggg

SEQ ID NO: 1255 - RNA, 17 nt, synthetic construct
  source 1..17: mol_type = other RNA
ccccttattgttataca

SEQ ID NO: 1256 - RNA, 21 nt, synthetic construct
  source 1..21: mol_type = other RNA
  modified_base 2: mod_base = OTHER; note = 2'-OMe modified nucleotide
  modified_base 4: mod_base = OTHER; note = 2'-OMe modified nucleotide
  modified_base 6: mod_base = OTHER; note = 2'-OMe modified nucleotide
  modified_base 9..10: mod_base = OTHER; note = 2'-OMe modified nucleotide
  modified_base 12: mod_base = OTHER; note = 2'-OMe modified nucleotide
  modified_base 14: mod_base = OTHER; note = 2'-OMe modified nucleotide
  modified_base 16: mod_base = OTHER; note = 2'-OMe modified nucleotide
  modified_base 18..21: mod_base = OTHER; note = 2'-OMe modified nucleotide
  modified_base 1: mod_base = OTHER; note = 2-deoxy-2-fluoro ribonucleotide
  modified_base 3: mod_base = OTHER; note = 2-deoxy-2-fluoro ribonucleotide
  modified_base 5: mod_base = OTHER; note = 2-deoxy-2-fluoro ribonucleotide
  modified_base 7..9: mod_base = OTHER; note = 2-deoxy-2-fluoro ribonucleotide
  modified_base 11: mod_base = OTHER; note = 2-deoxy-2-fluoro ribonucleotide
  modified_base 13: mod_base = OTHER; note = 2-deoxy-2-fluoro ribonucleotide
  modified_base 15: mod_base = OTHER; note = 2-deoxy-2-fluoro ribonucleotide
  modified_base 17: mod_base = OTHER; note = 2-deoxy-2-fluoro ribonucleotide
  modified_base 20..21: mod_base = OTHER; note = phosphorothioate internucleotide linkage
gccccttattgttatacgatt

SEQ ID NO: 1257 - RNA, 21 nt, synthetic construct
  source 1..21: mol_type = other RNA
  modified_base 21: mod_base = OTHER; note = inverted deoxyribonucleotide
  modified_base 1..8: mod_base = OTHER; note = 2'-OMe modified nucleotide
  modified_base 12..20: mod_base = OTHER; note = 2'-OMe modified nucleotide
  modified_base 9..11: mod_base = OTHER; note = 2-deoxy-2-fluoro ribonucleotide
  modified_base 1: mod_base = OTHER; note = phosphorothioate internucleotide linkage
  modified_base 1..2: mod_base = OTHER; note = phosphorothioate internucleotide linkage
  modified_base 20..21: mod_base = OTHER; note = phosphorothioate internucleotide linkage
cagccccttattgttatacga

SEQ ID NO: 1258 - RNA, 19 nt, synthetic construct
  source 1..19: mol_type = other RNA
ttatcgaggctcattctca

SEQ ID NO: 1259 - RNA, 19 nt, synthetic construct
  source 1..19: mol_type = other RNA
gccccttattgttatacga

SEQ ID NO: 1260 - RNA, 22 nt, synthetic construct
  source 1..22: mol_type = other RNA
acagccccttattgttatacga

SEQ ID NO: 1261 - RNA, 22 nt, synthetic construct
  source 1..22: mol_type = other RNA
aaagccccttattgttatacga

SEQ ID NO: 1262 - RNA, 21 nt, synthetic construct
  source 1..21: mol_type = other RNA
  modified_base 1: mod_base = OTHER; note = 2'-OMe modified nucleotide
  modified_base 3: mod_base = OTHER; note = 2'-OMe modified nucleotide
  modified_base 5: mod_base = OTHER; note = 2'-OMe modified nucleotide
  modified_base 7: mod_base = OTHER; note = 2'-OMe modified nucleotide
  modified_base 9: mod_base = OTHER; note = 2'-OMe modified nucleotide
  modified_base 11: mod_base = OTHER; note = 2'-OMe modified nucleotide
  modified_base 13: mod_base = OTHER; note = 2'-OMe modified nucleotide
  modified_base 15: mod_base = OTHER; note = 2'-OMe modified nucleotide
  modified_base 17: mod_base = OTHER; note = 2'-OMe modified nucleotide
  modified_base 19: mod_base = OTHER; note = 2'-OMe modified nucleotide
  modified_base 20..21: mod_base = OTHER; note = 2'-OMe modified nucleotide
  modified_base 2: mod_base = OTHER; note = 2-deoxy-2-fluoro ribonucleotide
  modified_base 4: mod_base = OTHER; note = 2-deoxy-2-fluoro ribonucleotide
  modified_base 6: mod_base = OTHER; note = 2-deoxy-2-fluoro ribonucleotide
  modified_base 8: mod_base = OTHER; note = 2-deoxy-2-fluoro ribonucleotide
  modified_base 10: mod_base = OTHER; note = 2-deoxy-2-fluoro ribonucleotide
  modified_base 12: mod_base = OTHER; note = 2-deoxy-2-fluoro ribonucleotide
  modified_base 14: mod_base = OTHER; note = 2-deoxy-2-fluoro ribonucleotide
  modified_base 16: mod_base = OTHER; note = 2-deoxy-2-fluoro ribonucleotide
  modified_base 18: mod_base = OTHER; note = 2-deoxy-2-fluoro ribonucleotide
  modified_base 1..2: mod_base = OTHER; note = phosphorothioate internucleotide linkage
  modified_base 2..3: mod_base = OTHER; note = phosphorothioate internucleotide linkage
  modified_base 3..4: mod_base = OTHER; note = phosphorothioate internucleotide linkage
  modified_base 20..21: mod_base = OTHER; note = phosphorothioate internucleotide linkage
tgagaatgagcctcgataatt

SEQ ID NO: 1263 - RNA, 21 nt, synthetic construct
  source 1..21: mol_type = other RNA
  modified_base 1: mod_base = OTHER; note = cyclopropyl phosphonate
  modified_base 1: mod_base = OTHER; note = 2'-methoxyethyl nucleotide
  modified_base 3: mod_base = OTHER; note = 2'-OMe modified nucleotide
  modified_base 5: mod_base = OTHER; note = 2'-OMe modified nucleotide
  modified_base 7: mod_base = OTHER; note = 2'-OMe modified nucleotide
  modified_base 11: mod_base = OTHER; note = 2'-OMe modified nucleotide
  modified_base 13: mod_base = OTHER; note = 2'-OMe modified nucleotide
  modified_base 15: mod_base = OTHER; note = 2'-OMe modified nucleotide
  modified_base 17: mod_base = OTHER; note = 2'-OMe modified nucleotide
  modified_base 19..21: mod_base = OTHER; note = 2'-OMe modified nucleotide
  modified_base 2: mod_base = OTHER; note = 2-deoxy-2-fluoro ribonucleotide
  modified_base 4: mod_base = OTHER; note = 2-deoxy-2-fluoro ribonucleotide
  modified_base 6: mod_base = OTHER; note = 2-deoxy-2-fluoro ribonucleotide
  modified_base 8..10: mod_base = OTHER; note = 2-deoxy-2-fluoro ribonucleotide
  modified_base 12: mod_base = OTHER; note = 2-deoxy-2-fluoro ribonucleotide
  modified_base 14: mod_base = OTHER; note = 2-deoxy-2-fluoro ribonucleotide
  modified_base 16: mod_base = OTHER; note = 2-deoxy-2-fluoro ribonucleotide
  modified_base 18: mod_base = OTHER; note = 2-deoxy-2-fluoro ribonucleotide
  modified_base 1..2: mod_base = OTHER; note = phosphorothioate internucleotide linkage
  modified_base 2..3: mod_base = OTHER; note = phosphorothioate internucleotide linkage
  modified_base 3..4: mod_base = OTHER; note = phosphorothioate internucleotide linkage
  modified_base 20..21: mod_base = OTHER; note = phosphorothioate internucleotide linkage
  modified_base 1: mod_base = OTHER; note = Thymine
tcgtataacaataaggggctt

SEQ ID NO: 1264 - RNA, 21 nt, synthetic construct
  source 1..21: mol_type = other RNA
  modified_base 1: mod_base = OTHER; note = cyclopropyl phosphonate
  modified_base 1: mod_base = OTHER; note = 2'-methoxyethyl nucleotide
  modified_base 3: mod_base = OTHER; note = 2'-OMe modified nucleotide
  modified_base 5: mod_base = OTHER; note = 2'-OMe modified nucleotide
  modified_base 7: mod_base = OTHER; note = 2'-OMe modified nucleotide
  modified_base 9: mod_base = OTHER; note = 2'-OMe modified nucleotide
  modified_base 11: mod_base = OTHER; note = 2'-OMe modified nucleotide
  modified_base 13: mod_base = OTHER; note = 2'-OMe modified nucleotide
  modified_base 15: mod_base = OTHER; note = 2'-OMe modified nucleotide
  modified_base 17: mod_base = OTHER; note = 2'-OMe modified nucleotide
  modified_base 19..21: mod_base = OTHER; note = 2'-OMe modified nucleotide
  modified_base 2: mod_base = OTHER; note = 2-deoxy-2-fluoro ribonucleotide
  modified_base 4: mod_base = OTHER; note = 2-deoxy-2-fluoro ribonucleotide
  modified_base 6: mod_base = OTHER; note = 2-deoxy-2-fluoro ribonucleotide
  modified_base 8: mod_base = OTHER; note = 2-deoxy-2-fluoro ribonucleotide
  modified_base 10: mod_base = OTHER; note = 2-deoxy-2-fluoro ribonucleotide
  modified_base 12: mod_base = OTHER; note = 2-deoxy-2-fluoro ribonucleotide
  modified_base 14: mod_base = OTHER; note = 2-deoxy-2-fluoro ribonucleotide
  modified_base 16: mod_base = OTHER; note = 2-deoxy-2-fluoro ribonucleotide
  modified_base 18: mod_base = OTHER; note = 2-deoxy-2-fluoro ribonucleotide
  modified_base 1..2: mod_base = OTHER; note = phosphorothioate internucleotide linkage
  modified_base 2..3: mod_base = OTHER; note = phosphorothioate internucleotide linkage
  modified_base 3..4: mod_base = OTHER; note = phosphorothioate internucleotide linkage
  modified_base 20..21: mod_base = OTHER; note = phosphorothioate internucleotide linkage
  modified_base 1: mod_base = OTHER; note = Thymine
tcgtataacaataaggggctt

SEQ ID NO: 1265 - RNA, 26 nt, synthetic construct
  source 1..26: mol_type = other RNA
  modified_base 1: mod_base = OTHER; note = 2'-OMe modified nucleotide
  modified_base 3..8: mod_base = OTHER; note = 2'-OMe modified nucleotide
  modified_base 10..11: mod_base = OTHER; note = 2'-OMe modified nucleotide
  modified_base 13: mod_base = OTHER; note = 2'-OMe modified nucleotide
  modified_base 15..17: mod_base = OTHER; note = 2'-OMe modified nucleotide
  modified_base 19..21: mod_base = OTHER; note = 2'-OMe modified nucleotide
  modified_base 23..24: mod_base = OTHER; note = 2'-OMe modified nucleotide
  modified_base 26: mod_base = OTHER; note = 2'-OMe modified nucleotide
  modified_base 2: mod_base = OTHER; note = 2-deoxy-2-fluoro ribonucleotide
  modified_base 9: mod_base = OTHER; note = 2-deoxy-2-fluoro ribonucleotide
  modified_base 12: mod_base = OTHER; note = 2-deoxy-2-fluoro ribonucleotide
  modified_base 14: mod_base = OTHER; note = 2-deoxy-2-fluoro ribonucleotide
  modified_base 18: mod_base = OTHER; note = 2-deoxy-2-fluoro ribonucleotide
  modified_base 22: mod_base = OTHER; note = 2-deoxy-2-fluoro ribonucleotide
  modified_base 1..2: mod_base = OTHER; note = phosphorothioate internucleotide linkage
  modified_base 2..3: mod_base = OTHER; note = phosphorothioate internucleotide linkage
  modified_base 22..23: mod_base = OTHER; note = phosphorothioate internucleotide linkage
  modified_base 23..24: mod_base = OTHER; note = phosphorothioate internucleotide linkage
tcgtataacaataaggggctgcctat

SEQ ID NO: 1266 - RNA, 26 nt, synthetic construct
  source 1..26: mol_type = other RNA
  modified_base 1: mod_base = OTHER; note = 2'-OMe modified nucleotide
  modified_base 3..5: mod_base = OTHER; note = 2'-OMe modified nucleotide
  modified_base 7..8: mod_base = OTHER; note = 2'-OMe modified nucleotide
  modified_base 10..11: mod_base = OTHER; note = 2'-OMe modified nucleotide
  modified_base 13: mod_base = OTHER; note = 2'-OMe modified nucleotide
  modified_base 15..17: mod_base = OTHER; note = 2'-OMe modified nucleotide
  modified_base 19..21: mod_base = OTHER; note = 2'-OMe modified nucleotide
  modified_base 23..24: mod_base = OTHER; note = 2'-OMe modified nucleotide
  modified_base 26: mod_base = OTHER; note = 2'-OMe modified nucleotide
  modified_base 2: mod_base = OTHER; note = 2-deoxy-2-fluoro ribonucleotide
  modified_base 6: mod_base = OTHER; note = 2-deoxy-2-fluoro ribonucleotide
  modified_base 9: mod_base = OTHER; note = 2-deoxy-2-fluoro ribonucleotide
  modified_base 12: mod_base = OTHER; note = 2-deoxy-2-fluoro ribonucleotide
  modified_base 14: mod_base = OTHER; note = 2-deoxy-2-fluoro ribonucleotide
  modified_base 18: mod_base = OTHER; note = 2-deoxy-2-fluoro ribonucleotide
  modified_base 22: mod_base = OTHER; note = 2-deoxy-2-fluoro ribonucleotide
  modified_base 1..2: mod_base = OTHER; note = phosphorothioate internucleotide linkage
  modified_base 2..3: mod_base = OTHER; note = phosphorothioate internucleotide linkage
  modified_base 22..23: mod_base = OTHER; note = phosphorothioate internucleotide linkage
  modified_base 23..24: mod_base = OTHER; note = phosphorothioate internucleotide linkage
tcgtataacaataaggggctgcctat

SEQ ID NO: 1267 - RNA, 21 nt, synthetic construct
  source 1..21: mol_type = other RNA
  modified_base 1: mod_base = OTHER; note = 2'-OMe modified nucleotide
  modified_base 3: mod_base = OTHER; note = 2'-OMe modified nucleotide
  modified_base 5: mod_base = OTHER; note = 2'-OMe modified nucleotide
  modified_base 7..11: mod_base = OTHER; note = 2'-OMe modified nucleotide
  modified_base 13: mod_base = OTHER; note = 2'-OMe modified nucleotide
  modified_base 15: mod_base = OTHER; note = 2'-OMe modified nucleotide
  modified_base 17: mod_base = OTHER; note = 2'-OMe modified nucleotide
  modified_base 19: mod_base = OTHER; note = 2'-OMe modified nucleotide
  modified_base 21: mod_base = OTHER; note = 2'-OMe modified nucleotide
  modified_base 2: mod_base = OTHER; note = 2-deoxy-2-fluoro ribonucleotide
  modified_base 4: mod_base = OTHER; note = 2-deoxy-2-fluoro ribonucleotide
  modified_base 6: mod_base = OTHER; note = 2-deoxy-2-fluoro ribonucleotide
  modified_base 12: mod_base = OTHER; note = 2-deoxy-2-fluoro ribonucleotide
  modified_base 14: mod_base = OTHER; note = 2-deoxy-2-fluoro ribonucleotide
  modified_base 16: mod_base = OTHER; note = 2-deoxy-2-fluoro ribonucleotide
  modified_base 18: mod_base = OTHER; note = 2-deoxy-2-fluoro ribonucleotide
  modified_base 20: mod_base = OTHER; note = 2-deoxy-2-fluoro ribonucleotide
  modified_base 1..2: mod_base = OTHER; note = phosphorothioate internucleotide linkage
  modified_base 2..3: mod_base = OTHER; note = phosphorothioate internucleotide linkage
  modified_base 19..20: mod_base = OTHER; note = phosphorothioate internucleotide linkage
  modified_base 20..21: mod_base = OTHER; note = phosphorothioate internucleotide linkage
tcgtataacaataaggggctt

SEQ ID NO: 1268 - RNA, 21 nt, synthetic construct
  source 1..21: mol_type = other RNA
  modified_base 1: mod_base = OTHER; note = 2'-OMe modified nucleotide
  modified_base 3: mod_base = OTHER; note = 2'-OMe modified nucleotide
  modified_base 5: mod_base = OTHER; note = 2'-OMe modified nucleotide
  modified_base 7: mod_base = OTHER; note = 2'-OMe modified nucleotide
  modified_base 11: mod_base = OTHER; note = 2'-OMe modified nucleotide
  modified_base 13: mod_base = OTHER; note = 2'-OMe modified nucleotide
  modified_base 15: mod_base = OTHER; note = 2'-OMe modified nucleotide
  modified_base 17: mod_base = OTHER; note = 2'-OMe modified nucleotide
  modified_base 19..21: mod_base = OTHER; note = 2'-OMe modified nucleotide
  modified_base 2: mod_base = OTHER; note = 2-deoxy-2-fluoro ribonucleotide
  modified_base 4: mod_base = OTHER; note = 2-deoxy-2-fluoro ribonucleotide
  modified_base 6: mod_base = OTHER; note = 2-deoxy-2-fluoro ribonucleotide
  modified_base 8..10: mod_base = OTHER; note = 2-deoxy-2-fluoro ribonucleotide
  modified_base 12: mod_base = OTHER; note = 2-deoxy-2-fluoro ribonucleotide
  modified_base 14: mod_base = OTHER; note = 2-deoxy-2-fluoro ribonucleotide
  modified_base 16: mod_base = OTHER; note = 2-deoxy-2-fluoro ribonucleotide
  modified_base 18: mod_base = OTHER; note = 2-deoxy-2-fluoro ribonucleotide
  modified_base 1..2: mod_base = OTHER; note = phosphorothioate internucleotide linkage
  modified_base 2..3: mod_base = OTHER; note = phosphorothioate internucleotide linkage
  modified_base 3..4: mod_base = OTHER; note = phosphorothioate internucleotide linkage
  modified_base 20..21: mod_base = OTHER; note = phosphorothioate internucleotide linkage
tcgtataacaataaggggctt

SEQ ID NO: 1269 - RNA, 26 nt, synthetic construct
  source 1..26: mol_type = other RNA
  modified_base 1..13: mod_base = OTHER; note = 2'-OMe modified nucleotide
  modified_base 17..26: mod_base = OTHER; note = 2'-OMe modified nucleotide
  modified_base 14..16: mod_base = OTHER; note = 2-deoxy-2-fluoro ribonucleotide
  modified_base 5..6: mod_base = OTHER; note = phosphorothioate internucleotide linkage
  modified_base 6..7: mod_base = OTHER; note = phosphorothioate internucleotide linkage
  modified_base 26: mod_base = OTHER; note = phosphorothioate internucleotide linkage
tatatagttatcgaggctcattctca

SEQ ID NO: 1270 - RNA, 19 nt, synthetic construct
  source 1..19: mol_type = other RNA
  modified_base 1..6: mod_base = OTHER; note = 2'-OMe modified nucleotide
  modified_base 10..19: mod_base = OTHER; note = 2'-OMe modified nucleotide
  modified_base 7..9: mod_base = OTHER; note = 2-deoxy-2-fluoro ribonucleotide
  modified_base 19: mod_base = OTHER; note = phosphorothioate internucleotide linkage
ttatcgaggctcattctca

SEQ ID NO: 1271 - RNA, 19 nt, synthetic construct
  source 1..19: mol_type = other RNA
  modified_base 2: mod_base = OTHER; note = 2'-OMe modified nucleotide
  modified_base 4: mod_base = OTHER; note = 2'-OMe modified nucleotide
  modified_base 6: mod_base = OTHER; note = 2'-OMe modified nucleotide
  modified_base 10: mod_base = OTHER; note = 2'-OMe modified nucleotide
  modified_base 12: mod_base = OTHER; note = 2'-OMe modified nucleotide
  modified_base 14: mod_base = OTHER; note = 2'-OMe modified nucleotide
  modified_base 16: mod_base = OTHER; note = 2'-OMe modified nucleotide
  modified_base 18..19: mod_base = OTHER; note = 2'-OMe modified nucleotide
  modified_base 1: mod_base = OTHER; note = 2-deoxy-2-fluoro ribonucleotide
  modified_base 3: mod_base = OTHER; note = 2-deoxy-2-fluoro ribonucleotide
  modified_base 5: mod_base = OTHER; note = 2-deoxy-2-fluoro ribonucleotide
  modified_base 7..9: mod_base = OTHER; note = 2-deoxy-2-fluoro ribonucleotide
  modified_base 11: mod_base = OTHER; note = 2-deoxy-2-fluoro ribonucleotide
  modified_base 13: mod_base = OTHER; note = 2-deoxy-2-fluoro ribonucleotide
  modified_base 15: mod_base = OTHER; note = 2-deoxy-2-fluoro ribonucleotide
  modified_base 17: mod_base = OTHER; note = 2-deoxy-2-fluoro ribonucleotide
  modified_base 19: mod_base = OTHER; note = phosphorothioate internucleotide linkage
gccccttattgttatacga

SEQ ID NO: 1272 - RNA, 21 nt, synthetic construct
  source 1..21: mol_type = other RNA
  modified_base 1..6: mod_base = OTHER; note = 2'-OMe modified nucleotide
  modified_base 10..21: mod_base = OTHER; note = 2'-OMe modified nucleotide
  modified_base 7..9: mod_base = OTHER; note = 2-deoxy-2-fluoro ribonucleotide
  modified_base 20..21: mod_base = OTHER; note = phosphorothioate internucleotide linkage
gccccttattgttatacgatt

SEQ ID NO: 1273 - RNA, 26 nt, synthetic construct
  source 1..26: mol_type = other RNA
  modified_base 1..13: mod_base = OTHER; note = 2'-OMe modified nucleotide
  modified_base 17..26: mod_base = OTHER; note = 2'-OMe modified nucleotide
  modified_base 14..16: mod_base = OTHER; note = 2-deoxy-2-fluoro ribonucleotide
  modified_base 5..6: mod_base = OTHER; note = phosphorothioate internucleotide linkage
  modified_base 6..7: mod_base = OTHER; note = phosphorothioate internucleotide linkage
  modified_base 26: mod_base = OTHER; note = phosphorothioate internucleotide linkage
tatatcagccccttattgttatacga

SEQ ID NO: 1274 - RNA, 19 nt, synthetic construct
  source 1..19: mol_type = other RNA
  modified_base 1..6: mod_base = OTHER; note = 2'-OMe modified nucleotide
  modified_base 10..19: mod_base = OTHER; note = 2'-OMe modified nucleotide
  modified_base 7..9: mod_base = OTHER; note = 2-deoxy-2-fluoro ribonucleotide
  modified_base 19: mod_base = OTHER; note = phosphorothioate internucleotide linkage
gccccttattgttatacga

SEQ ID NO: 1275 - RNA, 21 nt, synthetic construct
  source 1..21: mol_type = other RNA
  modified_base 21: mod_base = OTHER; note = inverted deoxyribonucleotide
  modified_base 1..8: mod_base = OTHER; note = 2'-OMe modified nucleotide
  modified_base 12..20: mod_base = OTHER; note = 2'-OMe modified nucleotide
  modified_base 9..11: mod_base = OTHER; note = 2-deoxy-2-fluoro ribonucleotide
  modified_base 1: mod_base = OTHER; note = phosphorothioate internucleotide linkage
  modified_base 1..2: mod_base = OTHER; note = phosphorothioate internucleotide linkage
  modified_base 20..21: mod_base = OTHER; note = phosphorothioate internucleotide linkage
aagccccttattgttatacga

SEQ ID NO: 1276 - RNA, 21 nt, synthetic construct
  source 1..21: mol_type = other RNA
  modified_base 1..8: mod_base = OTHER; note = 2'-OMe modified nucleotide
  modified_base 12..21: mod_base = OTHER; note = 2'-OMe modified nucleotide
  modified_base 9..11: mod_base = OTHER; note = 2-deoxy-2-fluoro ribonucleotide
  modified_base 1: mod_base = OTHER; note = phosphorothioate internucleotide linkage
  modified_base 1..2: mod_base = OTHER; note = phosphorothioate internucleotide linkage
  modified_base 21: mod_base = OTHER; note = phosphorothioate internucleotide linkage
cagccccttattgttatacga

SEQ ID NO: 1277 - RNA, 19 nt, synthetic construct
  source 1..19: mol_type = other RNA
  modified_base 1..6: mod_base = OTHER; note = 2'-OMe modified nucleotide
  modified_base 10..19: mod_base = OTHER; note = 2'-OMe modified nucleotide
  modified_base 7..9: mod_base = OTHER; note = 2-deoxy-2-fluoro ribonucleotide
  modified_base 1: mod_base = OTHER; note = phosphorothioate internucleotide linkage
  modified_base 1..2: mod_base = OTHER; note = phosphorothioate internucleotide linkage
  modified_base 19: mod_base = OTHER; note = phosphorothioate internucleotide linkage
gccccttattgttatacga

SEQ ID NO: 1278 - RNA, 19 nt, synthetic construct
  source 1..19: mol_type = other RNA
  modified_base 19: mod_base = OTHER; note = inverted deoxyribonucleotide
  modified_base 1..6: mod_base = OTHER; note = 2'-OMe modified nucleotide
  modified_base 10..18: mod_base = OTHER; note = 2'-OMe modified nucleotide
  modified_base 7..9: mod_base = OTHER; note = 2-deoxy-2-fluoro ribonucleotide
  modified_base 1: mod_base = OTHER; note = phosphorothioate internucleotide linkage
  modified_base 1..2: mod_base = OTHER; note = phosphorothioate internucleotide linkage
  modified_base 18..19: mod_base = OTHER; note = phosphorothioate internucleotide linkage
gccccttattgttatacga

SEQ ID NO: 1279 - RNA, 21 nt, synthetic construct
  source 1..21: mol_type = other RNA
  modified_base 1..8: mod_base = OTHER; note = 2'-OMe modified nucleotide
  modified_base 12..21: mod_base = OTHER; note = 2'-OMe modified nucleotide
  modified_base 9..11: mod_base = OTHER; note = 2-deoxy-2-fluoro ribonucleotide
  modified_base 1: mod_base = OTHER; note = phosphorothioate internucleotide linkage
  modified_base 1..2: mod_base = OTHER; note = phosphorothioate internucleotide linkage
  modified_base 21: mod_base = OTHER; note = phosphorothioate internucleotide linkage
aagccccttattgttatacga

SEQ ID NO: 1280 - RNA, 18 nt, synthetic construct
  source 1..18: mol_type = other RNA
cgtataacaataaggggc

SEQ ID NO: 1281 - RNA, 18 nt, synthetic construct
  source 1..18: mol_type = other RNA
gagaatgagcctcgataa

SEQ ID NO: 1282 - RNA, 19 nt, synthetic construct
  source 1..19: mol_type = other RNA
tcgtataacaataaggggc

SEQ ID NO: 1283 - RNA, 19 nt, synthetic construct
  source 1..19: mol_type = other RNA
tgagaatgagcctcgataa

SEQ ID NO: 1284 - RNA, 18 nt, synthetic construct
  source 1..18: mol_type = other RNA
gccccttattgttatacg

SEQ ID NO: 1285 - RNA, 18 nt, synthetic construct
  source 1..18: mol_type = other RNA
ttatcgaggctcattctc

1-31. (canceled)

32. An LPA RNA interference (RNAi) agent comprising:
a sense strand and an antisense strand, each of which is 17 to 26 nucleotides in length, wherein the antisense strand comprises a sequence that is complementary to an LPA mRNA sequence and the sense strand comprises a sequence that is complementary to the sequence of the antisense strand; and
a targeting group comprising an asialoglycoprotein receptor ligand, said ligand comprising an N-acetyl-galactosamine trimer, wherein the targeting group is conjugated to the 5′ end of the sense strand;
and wherein the LPA RNAi agent has two blunt ends.

33. The LPA RNAi agent of claim 32, wherein the sense strand and the antisense strand are each 19 to 26 nucleotides in length.

34. The LPA RNAi agent of claim 32, wherein the sense strand and the antisense strand are each 21 nucleotides in length.

35. The LPA RNAi agent of claim 32, wherein the sense strand, the antisense strand, or both the sense and antisense strand comprise one or more modified nucleotides.

36. The LPA RNAi agent of claim 35, wherein the one or more modified nucleotides are independently selected from a 2′-modified nucleotide, a locked nucleotide, an abasic nucleotide, an inverted deoxynucleotide, a morpholino nucleotide, a 2′,3′-seco nucleotide mimic, or a nucleotide containing a non-natural base.

37. The LPA RNAi agent of claim 36, wherein the 2′-modified nucleotide is a 2′-O-methyl nucleotide, a 2′-deoxy-2′-fluoro nucleotide, a 2′-deoxynucleotide, a 2′-methoxyethyl nucleotide, a 2′-amino nucleotide, or a 2′-alkyl nucleotide.

38. The LPA RNAi agent of claim 32, wherein the LPA RNAi agent comprises one or more phosphorothioate internucleoside linkages.

39. The LPA RNAi agent of claim 38, wherein the sense strand comprises two phosphorothioate internucleoside linkages and the antisense strand comprises four phosphorothioate internucleoside linkages.

40. The LPA RNAi agent of claim 35, wherein both the sense strand and the antisense strand comprise one or more 2′-modified nucleotides and one or more phosphorothioate internucleoside linkages.

41. The LPA RNAi agent of claim 32, wherein the targeting group comprises:
wherein NAG is N-Acetyl-Galactosamine and X is O or S.

42. The LPA RNAi agent of claim 32, wherein the antisense strand comprises the sequence of nucleotides 2 to 17 of SEQ ID NO: 1254.

43. The LPA RNAi agent of claim 42, wherein the antisense strand comprises the sequence of SEQ ID NO: 5, SEQ ID NO: 6, SEQ ID NO: 111, SEQ ID NO: 116, SEQ ID NO: 117, SEQ ID NO: 135, SEQ ID NO: 156, SEQ ID NO: 161, SEQ ID NO: 162, SEQ ID NO: 164, SEQ ID NO: 165, SEQ ID NO: 169, SEQ ID NO: 170, SEQ ID NO: 171, SEQ ID NO: 172, SEQ ID NO: 178, SEQ ID NO: 180, SEQ ID NO: 181, SEQ ID NO: 182, SEQ ID NO: 186, SEQ ID NO: 187, SEQ ID NO: 188 or SEQ ID NO: 189.

44. The LPA RNAi agent of claim 42, wherein the antisense strand comprises the sequence of SEQ ID NO:1242, SEQ ID NO:1244, SEQ ID NO:1254, SEQ ID NO:1280, or SEQ ID NO:1282.

45. The LPA RNAi agent of claim 32, wherein the antisense strand comprises the sequence of SEQ ID NO:1248, SEQ ID NO:1250, SEQ ID NO:1252, SEQ ID NO:1281, or SEQ ID NO:1283.

46. A pharmaceutical composition comprising the LPA RNAi agent of claim 32 or a salt thereof and a pharmaceutically acceptable excipient.

47. A pre-filled syringe comprising the pharmaceutical composition of claim 46.

48. A method of treating coronary artery disease in a subject in need thereof comprising administering to the subject the LPA RNAi agent of claim 32.

49. A method of treating peripheral artery disease in a subject in need thereof comprising administering to the subject the LPA RNAi agent of claim 32.

50. A method of treating acute coronary syndrome in a subject in need thereof comprising administering to the subject the LPA RNAi agent of claim 32.
